(19) United States
(12) Patent Application Publication
(10) Pub. No.: US 2022/0017596 A1
(43) Pub. Date: Jan. 20, 2022

(54) MULTIMERIC T-CELL MODULATORY POLYPEPTIDES AND METHODS OF USE THEREOF

(71) Applicant: Cue Biopharma, Inc., Cambridge, MA (US)

(72) Inventors: Saso Cemerski, Cambridge, MA (US); Anish Suri, Cambridge, MA (US)

(21) Appl. No.: 17/490,516

(22) Filed: Sep. 30, 2021

Related U.S. Application Data
(63) Continuation of application No. PCT/US2020/034939, filed on May 28, 2020.
(60) Provisional application No. 62/901,538, filed on Sep. 17, 2019.
(60) Provisional application No. 62/872,048, filed on Jul. 9, 2019.
(60) Provisional application No. 62/854,200, filed on May 29, 2019.

(51) Int. Cl. C07K 14/74

(52) U.S. Cl. CPC C07K 14/70539; A61K 38/00

(57) ABSTRACT

The present disclosure provides T-cell modulatory multimeric polypeptides that comprise an immunomodulatory polypeptide, an epitope-presenting peptide, and class I MHC polypeptides. A T-cell modulatory multimeric polypeptide is useful for modulating the activity of a T cell, and for modulating an immune response in an individual.

### CROSS-REFERENCE

[0001] This application claims the benefit of U.S. Provisional Patent Application No. 62/854,200, filed May 29, 2019, U.S. Provisional Patent Application No. 62/872,048, filed Jul. 9, 2019, and U.S. Provisional Patent Application No. 62/901,538, filed Sep. 17, 2019, which applications are incorporated herein by reference in their entirety.

### INTRODUCTION

[0002] An adaptive immune response involves the engagement of the T cell receptor (TCR), present on the surface of a T cell, with a small peptide antigen non-covalently presented on the surface of an antigen presenting cell (APC) by a major histocompatibility complex (MHC; also referred to in humans as a human leukocyte antigen (HLA) complex). This engagement represents the immune system's targeting mechanism and is a requisite molecular interaction for T cell modulation (activation or inhibition) and effector function. Following epitope-specific cell targeting, the targeted T cells are activated through engagement of costimulatory proteins found on the APC with counterpart costimulatory proteins the T cells. Both signals—epitope/TCR binding and engagement of APC costimulatory proteins with T cell costimulatory proteins—are required to drive T cell specificity and activation or inhibition. The TCR is specific for a given epitope; however, the costimulatory protein not epitope specific and instead is generally expressed on all T cells or on large T cell subsets.

### SUMMARY

[0003] The present disclosure provides T-cell modulatory multimeric polypeptides (TMMPs) that comprise an immunomodulatory polypeptide, class I HLA polypeptides (a class I HLA heavy chain polypeptide and a β2 microglobulin polypeptide), and a peptide that presents an epitope to a T-cell receptor. A TMMP is useful for modulating the activity of a T cell, and for modulating an immune response in an individual.

### BRIEF DESCRIPTION OF THE DRAWINGS

[0004] FIGS. 1A-1J are schematic depictions of various TMMPs of the present disclosure.

[0005] FIGS. 2A-2F are schematic depictions of various disulfide-linked TMMPs of the present disclosure.

[0006] FIGS. 3A-3G provide amino acid sequences of immunoglobulin Fc polypeptides. The sequences are set forth in: SEQ ID NOs: 19-30.

[0007] FIG. 4 provides a multiple amino acid sequence alignment of beta-2 microglobulin (β2M) precursors (i.e., including the leader sequence) from Homo sapiens (NP_004039.1; SEQ ID NO:31), Pan troglodytes (NP_001009066.1; SEQ ID NO:31), Macaca mulatta (NP_001040602.1; SEQ ID NO:32), Bos taurus (NP_776318.1; SEQ ID NO:33) and Mus musculus (NP_033865.2; SEQ ID NO:34). Amino acids 1-20 are a signal peptide.

[0008] FIGS. 5A-5C provide amino acid sequences of full-length human HLA heavy chains of alleles A*0101 (SEQ ID NO: 35), A*1101 (SEQ ID NO: 36), A*2402 (SEQ ID NO: 37), and A*3303 (SEQ ID NO: 38) (FIG. 7A); full-length human HLA heavy chain of allele B*0702 (SEQ ID NO: 39) (FIG. 7B); and a full-length human HLA-C heavy chain (SEQ ID NO: 40) (FIG. 7C).

[0009] FIG. 6 provides an alignment of eleven mature MHC class I heavy chain amino acid sequences without their leader sequences, transmembrane domains, and intracellular domains. The sequences are set forth from top to bottom as follows: SEQ ID NOs: 41-51.

[0010] FIGS. 7A-7B provide an alignment of HLA-A heavy chain amino acid sequences (FIG. 7A; SEQ ID NO: 52-60, respectively) and a consensus sequence (FIG. 7B: 61).

[0011] FIGS. 8A-8B provide an alignment of HLA-B heavy chain amino acid sequences (FIG. 8A; SEQ ID NOs: 62-68, respectively) and a consensus sequence (FIG. 8B; SEQ ID NO: 69).

[0012] FIGS. 9A-9B provide an alignment of HLA-C heavy chain amino acid sequences (FIG. 9A; SEQ ID NOs: 70-78, respectively) and a consensus sequence (FIG. 9B; SEQ ID NO: 79).

[0013] FIG. 10 provides a consensus amino acid sequence for each of HLA-E, —F, and -G heavy chains (SEQ ID NOs: 80-82, respectively). Variable amino acid (aa) positions are indicated as “X” residues sequentially numbered; the locations of amino acids 84, 139, and 236 are double underlined.

[0014] FIG. 11 provides an alignment of consensus amino acid sequences for HLA-A (SEQ ID NO: 83), -B (SEQ ID NO: 84), -C(SEQ ID NO: 85), -E (SEQ ID NO: 86), -F (SEQ ID NO: 87), and -G (SEQ ID NO: 88).

[0015] FIG. 12A-12D provide schematic depictions of multiple disulfide-linked TMMP of the present disclosure.

[0016] FIG. 13A-13F provide amino acid sequences of examples of first and second polypeptides of a TMMP of the present disclosure. The sequences are set forth as follows: SEQ ID NOs: 89-94, respectively.

[0017] FIG. 14A-14C provide amino acid sequences of examples of polypeptides that can be included in a TMMP of the present disclosure. The sequences are set forth as follows: SEQ ID NOs: 95-97.

[0018] FIG. 15A-15B provide amino acid sequences of examples of polypeptides that can be included in a TMMP of the present disclosure. The sequences are set forth as follows: SEQ ID NOs: 561-562, respectively.

[0019] FIG. 16A-16B depict the effect of a TMMP according to an embodiment of the present disclosure on CD8⁺ cytolytic activity.

### DEFINITIONS

[0020] The terms “polynucleotide” and “nucleic acid,” used interchangeably herein, refer to a polymeric form of nucleotides of any length, either ribonucleotides or deoxyribonucleotides. Thus, this term includes, but is not limited to, single-, double-, or multi-stranded DNA or RNA, genomic DNA, cDNA, DNA-RNA hybrids, or a polymer comprising purine and pyrimidine bases or other natural, chemically or biochemically modified, non-natural, or derivatized nucleotide bases.

[0021] The terms “peptide,” “polypeptide,” and “protein” are used interchangeably herein, and refer to a polymeric form of amino acids of any length, which can include coded and non-coded amino acids, chemically or biochemically modified or derivatized amino acids, and polypeptides having modified peptide backbones.

[0022] A polynucleotide or polypeptide has a certain percent “sequence identity” to another polynucleotide or polypeptide, meaning that, when aligned, that percentage of bases or amino acids are the same, and in the same relative position, when comparing the two sequences. Sequence identity can be determined in a number of different ways. To determine sequence identity, sequences can be aligned using various convenient methods and computer programs (e.g., BLAST, T-COFFEE, MUSCLE, MAFFT, etc.), available over the world wide web at sites including ncbi.nlm.nili.gov/BLAST, ebi.ac.uk/Tools/msa/tcoffee/, ebi.ac.uk/Tools/msa/muscle/, mafft.cbrc.jp/alignment/software/. See, e.g., Altschul et al. (1990), J. Mol. Bioi. 215:403-10.

[0023] The term “conservative amino acid substitution” refers to the interchangeability in proteins of amino acid residues having similar side chains. For example, a group of amino acids having aliphatic side chains consists of glycine, alanine, valine, leucine, and isoleucine; a group of amino acids having aliphatic-hydroxyl side chains consists of serine and threonine; a group of amino acids having amide containing side chains consisting of asparagine and glutamine; a group of amino acids having aromatic side chains consists of phenylalanine, tyrosine, and tryptophan; a group of amino acids having basic side chains consists of lysine, arginine, and histidine; a group of amino acids having acidic side chains consists of glutamate and aspartate; and a group of amino acids having sulfur containing side chains consists of cysteine and methionine. Exemplary conservative amino acid substitution groups are: valine-leucine-isoleucine, phenylalanine-tyrosine, lysine-arginine, alanine-valine-glycine, and asparagine-glutamine.

[0024] The term “immunological synapse” or “immune synapse” as used herein generally refers to the natural interface between two interacting immune cells of an adaptive immune response including, e.g., the interface between an antigen-presenting cell (APC) or target cell and an effector cell, e.g., a lymphocyte, an effector T cell, a natural killer cell, and the like. An immunological synapse between an APC and a T cell is generally initiated by the interaction of a T cell antigen receptor and major histocompatibility complex molecules, e.g., as described in Bromley et al., Annu Rev Immunol. 2001; 19:375-96; the disclosure of which is incorporated herein by reference in its entirety.

[0025] “T cell” includes all types of immune cells expressing CD3, including T-helper cells (CD4⁺ cells), cytotoxic T-cells (CD8⁺ cells), T-regulatory cells (Treg), and NK-T cells.

[0026] The term “immunomodulatory polypeptide” (also referred to as a “co-stimulatory polypeptide”), as used herein, includes a polypeptide on an antigen presenting cell (APC) (e.g., a dendritic cell, a B cell, and the like) that specifically binds a cognate co-immunomodulatory polypeptide on a T cell, thereby providing a signal which, in addition to the primary signal provided by, for instance, binding of a TCR/CD3 complex with a major histocompatibility complex (MHC) polypeptide loaded with peptide, mediates a T cell response, including, but not limited to, proliferation, activation, differentiation, and the like. An immunomodulatory polypeptide can include, but is not limited to, CD7, B7-1 (CD80), B7-2 (CD86), PD-L1, PD-L2, 4-1BBL, OX40L, Fas ligand (FasL), inducible costimulatory ligand (ICOS-L), intercellular adhesion molecule (ICAM), CD30L, CD40, CD70, CD83, HLA-G, MICA, MICB, HVEM, lymphotoxin beta receptor, 3/TR6, ILT3, ILT4, HVEM, an agonist or antibody that binds Toll ligand receptor and a ligand that specifically binds with B7-H3.

[0027] As noted above, an “immunomodulatory polypeptide” (also referred to herein as a “MOD”) specifically binds a cognate co-immunomodulatory polypeptide on a T cell.

[0028] An “immunomodulatory domain” (“MOD”) of a TMMP of the present disclosure binds a cognate co-immunomodulatory polypeptide, which may be present on a target T cell.

[0029] “Heterologous,” as used herein, means a nucleotide or polypeptide that is not found in the native nucleic acid or protein, respectively.

[0030] “Recombinant,” as used herein, means that a particular nucleic acid (DNA or RNA) is the product of various combinations of cloning, restriction, polymerase chain reaction (PCR) and/or ligation steps resulting in a construct having a structural coding or non-coding sequence distinguishable from endogenous nucleic acids found in natural systems. DNA sequences encoding polypeptides can be assembled from cDNA fragments or from a series of synthetic oligonucleotides, to provide a synthetic nucleic acid which is capable of being expressed from a recombinant transcriptional unit contained in a cell or in a cell-free transcription and translation system.

[0031] The terms “recombinant expression vector,” or “DNA construct” are used interchangeably herein to refer to a DNA molecule comprising a vector and at least one insert. Recombinant expression vectors are usually generated for the purpose of expressing and/or propagating the insert(s), or for the construction of other recombinant nucleotide sequences. The insert(s) may or may not be operably linked to a promoter sequence and may or may not be operably linked to DNA regulatory sequences.

[0032] As used herein, the term “affinity” refers to the equilibrium constant for the reversible binding of two agents (e.g., an antibody and an antigen) and is expressed as a dissociation constant (K_{D}). Affinity can be at least 1-fold greater, at least 2-fold greater, at least 3-fold greater, at least 4-fold greater, at least 5-fold greater, at least 6-fold greater, at least 7-fold greater, at least 8-fold greater, at least 9-fold greater, at least 10-fold greater, at least 20-fold greater, at least 30-fold greater, at least 40-fold greater, at least 50-fold greater, at least 60-fold greater, at least 70-fold greater, at least 80-fold greater, at least 90-fold greater, at least 100-fold greater, or at least 1,000-fold greater, or more, than the affinity of an antibody for unrelated amino acid sequences. Affinity of an antibody to a target protein can be, for example, from about 100 nanomolar (nM) to about 0.1 nM, from about 100 nM to about 1 picomolar (pM), or from about 100 nM to about 1 femtomolar (fM) or more. As used herein, the term “avidity” refers to the resistance of a complex of two or more agents to dissociation after dilution. The terms “immunoreactive” and “preferentially binds” are used interchangeably herein with respect to antibodies and/or antigen-binding fragments.

[0033] The term “binding,” as used herein (e.g. with reference to binding of a TMMP to a polypeptide (e.g., a T-cell receptor) on a T cell), refers to a non-covalent interaction between two molecules. Non-covalent binding refers to a direct association between two molecules, due to, for example, electrostatic, hydrophobic, ionic, and/or hydrogen-bond interactions, including interactions such as salt bridges and water bridges. Non-covalent binding interactions are generally characterized by a dissociation constant (K_{D}) of less than 10⁻⁶ M, less than 10⁻⁷ M, less than 10⁻⁸ M, less than 10⁻⁹ M, less than 10⁻¹⁰M, less than 10⁻¹¹ M, less than 10⁻¹² M, less than 10⁻¹³ M, less than 10⁻¹⁴ M, or less than 10⁻¹⁵ M. “Affinity” refers to the strength of non-covalent binding, increased binding affinity being correlated with a lower K_{D}. “Specific binding” generally refers to binding with an affinity of at least about 10⁻¹⁵ M or greater, e.g., 5×10⁻⁷ M, 10⁻⁸ M, 5×10⁻⁸M, 10⁻⁹ M, and greater. “Non-specific binding” generally refers to binding (e.g., the binding of a ligand to a moiety other than its designated binding site or receptor) with an affinity of less than about 10⁻⁷ M (e.g., binding with an affinity of 10⁻⁶ M, 10⁻⁵ M, 10⁻⁴ M). However, in some contexts, e.g., binding between a TCR and a peptide/MHC complex, “specific binding” can be in the range of from 1 μM to 100 μM, or from 100 μM to 1 mM. “Covalent binding” or “covalent bond,” as used herein, refers to the formation of one or more covalent chemical binds between two different molecules.

[0034] The terms “treatment”, “treating” and the like are used herein to generally mean obtaining a desired pharmacologic and/or physiologic effect. The effect may be prophylactic in terms of completely or partially preventing a disease or symptom thereof and/or may be therapeutic in terms of a partial or complete cure for a disease and/or adverse effect attributable to the disease. “Treatment” as used herein covers any treatment of a disease or symptom in a mammal, and includes: (a) preventing the disease or symptom from occurring in a subject which may be predisposed to acquiring the disease or symptom but has not yet been diagnosed as having it; (b) inhibiting the disease or symptom, i.e., arresting its development; and/or (c) relieving the disease, i.e., causing regression of the disease. The therapeutic agent may be administered before, during or after the onset of disease or injury. The treatment of ongoing disease, where the treatment stabilizes or reduces the undesirable clinical symptoms of the patient, is of particular interest. Such treatment is desirably performed prior to complete loss of function in the affected tissues. The subject therapy will desirably be administered during the symptomatic stage of the disease, and in some cases after the symptomatic stage of the disease.

[0035] The terms “individual,” “subject,” “host,” and “patient,” are used interchangeably herein and refer to any mammalian subject for whom diagnosis, treatment, or therapy is desired. Mammals include, e.g., humans, non-human primates, rodents (e.g., rats; mice), lagomorphs (e.g., rabbits), ungulates (e.g., cows, sheep, pigs, horses, goats, and the like), etc.

[0036] The terms “antibodies” and “immunoglobulin” include antibodies or immunoglobulins of any isotype, fragments of antibodies that retain specific binding to antigen, including, but not limited to, Fab, Fv, scFv, and Fd fragments, chimeric antibodies, humanized antibodies, single-chain antibodies (scAb), single domain antibodies (dAb), single domain heavy chain antibodies, a single domain light chain antibodies, nanobodies, bi-specific antibodies, multi-specific antibodies, and fusion proteins comprising an antigen-binding (also referred to herein as antigen binding) portion of an antibody and a non-antibody protein. The antibodies can be detectably labeled, e.g., with a radioisotope, an enzyme that generates a detectable product, a fluorescent protein, and the like. The antibodies can be further conjugated to other moieties, such as members of specific binding pairs, e.g., biotin (member of biotin-avidin specific binding pair), and the like. Also encompassed by the term are Fab′, Fv, F(ab′)₂, and or other antibody fragments that retain specific binding to antigen, and monoclonal antibodies. As used herein, a monoclonal antibody is an antibody produced by a group of identical cells, all of which were produced from a single cell by repetitive cellular replication. That is, the clone of cells only produces a single antibody species. While a monoclonal antibody can be produced using hybridoma production technology, other production methods known to those skilled in the art can also be used (e.g., antibodies derived from antibody phage display libraries). An antibody can be monovalent or bivalent. An antibody can be an Ig monomer, which is a “Y-shaped” molecule that consists of four polypeptide chains: two heavy chains and two light chains connected by disulfide bonds.

[0037] The term “humanized immunoglobulin” as used herein refers to an immunoglobulin comprising portions of immunoglobulins of different origin, wherein at least one portion comprises amino acid sequences of human origin. For example, the humanized antibody can comprise portions derived from an immunoglobulin of nonhuman origin with the requisite specificity, such as a mouse, and from immunoglobulin sequences of human origin (e.g., chimeric immunoglobulin), joined together chemically by conventional techniques (e.g., synthetic) or prepared as a contiguous polypeptide using genetic engineering techniques (e.g., DNA encoding the protein portions of the chimeric antibody can be expressed to produce a contiguous polypeptide chain). Another example of a humanized immunoglobulin is an immunoglobulin containing one or more immunoglobulin chains comprising a complementarity-determining region (CDR) derived from an antibody of nonhuman origin and a framework region derived from a light and/or heavy chain of human origin (e.g., CDR-grafted antibodies with or without framework changes). Chimeric or CDR-grafted single chain antibodies are also encompassed by the term humanized immunoglobulin. See, e.g., U.S. Pat. No. 4,816,567; European Patent No. 0,125,023 B1; U.S. Pat. No. 4,816,397; European Patent No. 0,120,694 B1; WO 86/01533; European Patent No. 0,194,276 B1; U.S. Pat. No. 5,225,539; European Patent No. 0,239,400 B1; and European Patent Application No. 0,519,596 A1. See also, U.S. Pat. Nos. 4,946,778; 5,476,786; and Bird et al. (1988) Science 242:423, regarding single chain antibodies.

[0038] The term “nanobody” (Nb), as used herein, refers to the smallest antigen binding fragment or single variable domain (V_{HH}) derived from naturally occurring heavy chain antibody and is known to the person skilled in the art. They are derived from heavy chain only antibodies, seen in camelids (Hamers-Casterman et al. (1993) Nature 363:446; Desmyter et al. (1996) Nature Structural Biol. 3:803; and Desmyter et al. (2015) Curr. Opin. Struct. Biol. 32:1). In the family of “camelids” immunoglobulins devoid of light polypeptide chains are found. “Camelids” comprise old world camelids (Camelus bactrianus and Camelus dromedarius) and new world camelids (for example, Llama paccos, Llama glama, Llama guanicoe and Llama vicugna). A single variable domain heavy chain antibody is referred to herein as a nanobody or a V_{HH} antibody.

[0039] “Antibody fragments” comprise a portion of an intact antibody, for example, the antigen binding or variable region of the intact antibody. Examples of antibody fragments include Fab, Fab′, F(ab′)₂, and Fv fragments; diabodies; linear antibodies (Zapata et al., Protein Eng. 8(10): 1057-1062 (1995)); domain antibodies (dAb; Holt et al. (2003) Trends Biotechnol. 21:484); single-chain antibody molecules; and multi-specific antibodies formed from antibody fragments. Papain digestion of antibodies produces two identical antigen-binding fragments, called “Fab” fragments, each with a single antigen-binding site, and a residual “Fc” fragment, a designation reflecting the ability to crystallize readily. Pepsin treatment yields an F(ab′)₂ fragment that has two antigen combining sites and is still capable of cross-linking antigen.

[0040] “Fv” is the minimum antibody fragment that contains a complete antigen-recognition and -binding site. This region consists of a dimer of one heavy- and one light-chain variable domain in tight, non-covalent association. It is in this configuration that the three CDRS of each variable domain interact to define an antigen-binding site on the surface of the VH-VL dimer. Collectively, the six CDRs confer antigen-binding specificity to the antibody. However, even a single variable domain (or half of an Fv comprising only three CDRs specific for an antigen) has the ability to recognize and bind antigen, although at a lower affinity than the entire binding site.

[0041] The “Fab” fragment also contains the constant domain of the light chain and the first constant domain (CH1) of the heavy chain. Fab fragments differ from Fab′ fragments by the addition of a few residues at the carboxyl terminus of the heavy chain CH1 domain including one or more cysteines from the antibody hinge region. Fab′-SH is the designation herein for Fab′ in which the cysteine residue(s) of the constant domains bear a free thiol group. F(ab′)2 antibody fragments originally were produced as pairs of Fab′ fragments which have hinge cysteines between them. Other chemical couplings of antibody fragments are also known.

[0042] The “light chains” of antibodies (immunoglobulins) from any vertebrate species can be assigned to one of two clearly distinct types, called kappa and lambda, based on the amino acid sequences of their constant domains. Depending on the amino acid sequence of the constant domain of their heavy chains, immunoglobulins can be assigned to different classes. There are five major classes of immunoglobulins: IgA, IgD, IgE, IgG, and IgM, and several of these classes can be further divided into subclasses (isotypes), e.g., IgG1, IgG2, IgG3, IgG4, IgA, and IgA2. The subclasses can be further divided into types, e.g., IgG2a and IgG2b.

[0043] “Single-chain Fv” or “sFv” or “scFv” antibody fragments comprise the V_{H} and V_{L} domains of antibody, wherein these domains are present in a single polypeptide chain. In some embodiments, the Fv polypeptide further comprises a polypeptide linker between the VH and VL domains, which enables the sFv to form the desired structure for antigen binding. For a review of sFv, see Pluckthun in The Pharmacology of Monoclonal Antibodies, vol. 113, Rosenburg and Moore eds., Springer-Verlag, New York, pp. 269-315 (1994).

[0044] The term “diabodies” refers to small antibody fragments with two antigen-binding sites, which fragments comprise a heavy-chain variable domain (VH) connected to a light-chain variable domain (VL) in the same polypeptide chain (V_{H}—V_{L}). By using a linker that is too short to allow pairing between the two domains on the same chain, the domains are forced to pair with the complementary domains of another chain and create two antigen-binding sites. Diabodies are described more fully in, for example, EP 404,097; WO 93/11161; and Hollinger et al. (1993) Proc. Natl. Acad. Sci. USA 90:6444-6448.

[0045] As used herein, the term “CDR” or “complementarity determining region” is intended to mean the non-contiguous antigen combining sites found within the variable region of both heavy and light chain polypeptides. CDRs have been described by Kabat et al (1977) J. Biol. Chem. 252:6609; Kabat et al., U.S. Dept. of Health and Human Services, “Sequences of proteins of immunological interest” (1991) (also referred to herein as Kabat 1991); by Chothia et al. (1987) J. Mol. Biol. 196:901 (also referred to herein as Chothia 1987); and MacCallum et al. (1996) J. Mol. Biol. 262:732, where the definitions include overlapping or subsets of amino acid residues when compared against each other. Nevertheless, application of either definition to refer to a CDR of an antibody or grafted antibodies or variants thereof is intended to be within the scope of the term as defined and used herein. The amino acid residues, which encompass the CDRs, as defined by each of the above cited references are set forth below in Table 2 as a comparison.

TABLE 2
CDR Definitions

| | Kabat¹ | Chothia² | MacCallum³ |
|---|---|---|---|
| V_{H} CDR-1 | 31-35 | 26-32 | 30-35 |
| V_{H} CDR-2 | 50-65 | 53-55 | 47-58 |
| V_{H} CDR-3 | 95-102 | 96-101 | 93-101 |
| V_{L} CDR-1 | 24-34 | 26-32 | 30-36 |
| V_{L} CDR-2 | 50-56 | 50-52 | 46-55 |
| V_{L} CDR-3 | 89-97 | 91-96 | 89-96 |

¹Residue numbering follows the nomenclature of Kabat et al., 1991, supra
²Residue numbering follows the nomenclature of Chothia et al., supra
³Residue numbering follows the nomenclature of MacCallum et al., supra

[0046] As used herein, the terms “CDR-L1”, “CDR-L2”, and “CDR-L3” refer, respectively, to the first, second, and third CDRs in a light chain variable region. As used herein, the terms “CDR-H1”, “CDR-H2”, and “CDR-H3” refer, respectively, to the first, second, and third CDRs in a heavy chain variable region. As used herein, the terms “CDR-1”, “CDR-2”, and “CDR-3” refer, respectively, to the first, second and third CDRs of either chain's variable region.

[0047] As used herein, the term “framework,” when used in reference to an antibody variable region, is intended to mean all amino acid residues outside the CDR regions within the variable region of an antibody. A variable region framework is generally a discontinuous amino acid sequence between about 100-120 amino acids in length but is intended to reference only those amino acids outside of the CDRs. As used herein, the term “framework region” is intended to mean each domain of the framework that is separated by the CDRs.

[0048] Before the present invention is further described, it is to be understood that this invention is not limited to particular embodiments described, as such may, of course, vary. It is also to be understood that the terminology used herein is for the purpose of describing particular embodiments only, and is not intended to be limiting, since the scope of the present invention will be limited only by the appended claims.

[0049] Where a range of values is provided, it is understood that each intervening value, to the tenth of the unit of the lower limit unless the context clearly dictates otherwise, between the upper and lower limit of that range and any other stated or intervening value in that stated range, is encompassed within the invention. The upper and lower limits of these smaller ranges may independently be included in the smaller ranges, and are also encompassed within the invention, subject to any specifically excluded limit in the stated range. Where the stated range includes one or both of the limits, ranges excluding either or both of those included limits are also included in the invention.

[0050] Unless defined otherwise, all technical and scientific terms used herein have the same meaning as commonly understood by one of ordinary skill in the art to which this invention belongs. Although any methods and materials similar or equivalent to those described herein can also be used in the practice or testing of the present invention, the preferred methods and materials are now described. All publications mentioned herein are incorporated herein by reference to disclose and describe the methods and/or materials in connection with which the publications are cited.

[0051] It must be noted that as used herein and in the appended claims, the singular forms “a,” “an,” and “the” include plural referents unless the context clearly dictates otherwise. Thus, for example, reference to a “T-cell modulatory multimeric polypeptide” includes a plurality of such polypeptides and reference to “the immunomodulatory polypeptide” includes reference to one or more immunomodulatory polypeptides and equivalents thereof known to those skilled in the art, and so forth. It is further noted that the claims may be drafted to exclude any optional element. As such, this statement is intended to serve as antecedent basis for use of such exclusive terminology as “solely,” “only” and the like in connection with the recitation of claim elements, or use of a “negative” limitation.

[0052] It is appreciated that certain features of the invention, which are, for clarity, described in the context of separate embodiments, may also be provided in combination in a single embodiment. Conversely, various features of the invention, which are, for brevity, described in the context of a single embodiment, may also be provided separately or in any suitable sub-combination. All combinations of the embodiments pertaining to the invention are specifically embraced by the present invention and are disclosed herein just as if each and every combination was individually and explicitly disclosed. In addition, all sub-combinations of the various embodiments and elements thereof are also specifically embraced by the present invention and are disclosed herein just as if each and every such sub-combination was individually and explicitly disclosed herein.

[0053] The publications discussed herein are provided solely for their disclosure prior to the filing date of the present application. Nothing herein is to be construed as an admission that the present invention is not entitled to antedate such publication by virtue of prior invention. Further, the dates of publication provided may be different from the actual publication dates which may need to be independently confirmed.

### DETAILED DESCRIPTION

[0054] The present disclosure provides T-cell modulatory multimeric polypeptides that comprise an immunomodulatory polypeptide and that comprise an epitope-presenting peptide. A TMMP is useful for modulating the activity of a T cell, and for modulating an immune response in an individual. T-CELL MODULATORY MULTIMERIC POLYPEPTIDES

[0055] The present disclosure provides a T-cell modulatory multimeric polypeptide (TMMP) comprising: a) a first polypeptide; and b) a second polypeptide, wherein the TMMP comprises: a peptide epitope (defined below); a first major histocompatibility complex (MHC) polypeptide; a second MHC polypeptide; one or more immunomodulatory polypeptides; an immunoglobulin (Ig) Fc polypeptide or a non-Ig scaffold; and a tumor targeting polypeptide (TTP).

[0056] The present disclosure provides a TMMP, wherein the TMMP is a heterodimer comprising: a) a first polypeptide comprising a first MHC polypeptide; and b) a second polypeptide comprising a second MHC polypeptide, wherein the first polypeptide or the second polypeptide comprises a peptide epitope (defined below), wherein the first polypeptide and/or the second polypeptide comprises one or more immunomodulatory polypeptides that can be the same or different; and an Ig F c polypeptide or a non-Ig scaffold. The first or the second polypeptide also includes a tumor targeting polypeptide. In some cases, the tumor targeting polypeptide is at the C-terminus of the Ig Fc polypeptide or the non-Ig scaffold. A TMMP of the present disclosure is also referred to herein as a “multimeric polypeptide of the present disclosure” or a “synTac.”

[0057] As used herein, the term “peptide epitope” means a peptide that, when complexed with MHC polypeptides, presents an epitope to a T-cell receptor (TCR). A peptide epitope has a length of at least 4 amino acids, e.g., from 4 amino acids to about 25 amino acids (e.g., 4 amino acids (aa), 5 aa, 6 aa, 7 aa, 8 aa, 9 aa, 10 aa, 11 aa, 12 aa, 13 aa, 14 aa, 15 aa, 16 aa, 17 aa, 18 aa, 19 aa, 20 aa, 21 aa, 22 aa, 23 aa, 24 aa, or 25 aa, including within a range of from 4 to 20 aa., from 6 to 18 aa., from 8 to 15 aa, from 8 to 12 aa., from 5 to 10 aa., from 10 to 15 aa., from 15 to 20 aa., from 10 to 20 aa., or from 15 to 25 aa, in length). When complexed with MHC polypeptides, a peptide epitope can present one or more epitopes to one or more TCRs. In some cases, the peptide epitope present in a TMMP of the present disclosure presents a cancer-associated epitope. In some cases, the peptide epitope present in a TMMP of the present disclosure presents an infectious disease-associated epitope (e.g., a virus-encoded peptide).

[0058] In some cases, a TMMP of the present disclosure includes: i) a virus epitope (e.g., a virus-encoded peptide); and iii) a TTP that targets a cancer-associated antigen. Such a TMMP binds a cancer cell that expresses the cancer-associated antigen targeted by the TTP. The TMMP modulates the activity of a T-cell specific for the virus epitope present in the TMMP. For example, in some cases, the TMMP increases proliferation and/or cytotoxic activity of a T-cell specific for the virus epitope present in the TMMP. Contacting a T-cell specific for the virus epitope present in the TMMP can increase cytotoxic activity of the T cell toward a cancer cell expressing the cancer-associated antigen that is targeted by the TTP present in the TMMP.

[0059] The present disclosure provides a TMMP comprising a heterodimeric polypeptide comprising: a) a first polypeptide comprising: i) a peptide epitope; and ii) a first MHC polypeptide; b) a second polypeptide comprising a second MHC polypeptide; c) at least one immunomodulatory polypeptide, where the first and/or the second polypeptide comprises the at least one (i.e., one or more) immunomodulatory polypeptide; d) an Ig Fc polypeptide or a non-Ig scaffold, where the first and/or the second polypeptide comprises the Ig Fc polypeptide or the non-Ig scaffold; and e) a polypeptide that targets a cancer cell (a tumor-targeting polypeptide; “TTP”). In some cases, at least one of the one or more immunomodulatory polypeptides is a variant immunomodulatory polypeptide that exhibits reduced affinity to a cognate co-immunomodulatory polypeptide compared to the affinity of a corresponding wild-type immunomodulatory polypeptide for the cognate co-immunomodulatory polypeptide. The epitope present in a TMMP of the present disclosure binds to a T-cell receptor (TCR) on a T cell with an affinity of at least 100 μM (e.g., at least 10 μM, at least 1 μM, at least 100 nM, at least 10 nM, or at least 1 nM). A TMMP of the present disclosure binds to a first T cell with an affinity that is at least 25% higher than the affinity with which the TMMP binds a second T cell, where the first T cell expresses on its surface the cognate co-immunomodulatory polypeptide and a TCR that binds the epitope with an affinity of at least 100 μM, and where the second T cell expresses on its surface the cognate co-immunomodulatory polypeptide but does not express on its surface a TCR that binds the epitope with an affinity of at least 100 μM (e.g., at least 10 μM, at least 1 μM, at least 100 nM, at least 10 nM, or at least 1 nM). In some cases, the peptide epitope present in a TMMP of the present disclosure presents a cancer-associated epitope. In some cases, the peptide epitope present in a TMMP of the present disclosure presents an infectious disease-associated epitope (e.g., a virus-encoded peptide).

[0060] A TMMP of the present disclosure comprises a tumor targeting polypeptide, i.e., a polypeptide that targets a cancer-associated epitope displayed on the surface of a cancer cell.

[0061] The present disclosure provides a TMMP, wherein the TMMP is:

[0062] A) a heterodimer comprising: a) a first polypeptide comprising a first MHC polypeptide; and b) a second polypeptide comprising a second MHC polypeptide, wherein the first polypeptide or the second polypeptide comprises a peptide epitope, wherein the first polypeptide and/or the second polypeptide comprises one or more immunomodulatory polypeptides that can be the same or different, and wherein at least one of the one or more immunomodulatory polypeptides may be a wild-type immunomodulatory polypeptide or a variant of a wild-type immunomodulatory polypeptide, wherein the variant immunomodulatory polypeptide comprises 1, 2, 3, 4, 5, 6, 7, 8, 9, 10, 11, 12, 13, 14, 15, 16, 17, 18, 19, or 20 amino acid substitutions compared to the amino acid sequence of the corresponding wild-type immunomodulatory polypeptide; wherein the first polypeptide and/or the second polypeptide comprises an Ig Fc polypeptide or a non-Ig scaffold; and wherein the first and/or the second polypeptide comprises a tumor targeting polypeptide; or

[0063] B) a heterodimer comprising: a) a first polypeptide comprising a first MHC polypeptide; and b) a second polypeptide comprising a second MHC polypeptide, wherein the first polypeptide or the second polypeptide comprises an epitope; wherein the first polypeptide and/or the second polypeptide comprises one or more immunomodulatory polypeptides that can be the same or different,

[0064] wherein at least one of the one or more immunomodulatory polypeptides is a variant of a wild-type immunomodulatory polypeptide, wherein the variant immunomodulatory polypeptide comprises 1, 2, 3, 4, 5, 6, 7, 8, 9, 10, 11, 12, 13, 14, 15, 16, 17, 18, 19, or 20 amino acid substitutions compared to the amino acid sequence of the corresponding wild-type immunomodulatory polypeptide,

[0065] wherein at least one of the one or more immunomodulatory domains is a variant immunomodulatory polypeptide that exhibits reduced affinity to a cognate co-immunomodulatory polypeptide compared to the affinity of a corresponding wild-type immunomodulatory polypeptide for the cognate co-immunomodulatory polypeptide, and wherein the epitope binds to a TCR on a T cell with an affinity of at least 10⁻⁷ M, such that: i) the TMMP polypeptide binds to a first T cell with an affinity that is at least 25% higher than the affinity with which the TMMP binds a second T cell, wherein the first T cell expresses on its surface the cognate co-immunomodulatory polypeptide and a TCR that binds the epitope with an affinity of at least 10⁻⁷ M, and wherein the second T cell expresses on its surface the cognate co-immunomodulatory polypeptide but does not express on its surface a TCR that binds the epitope with an affinity of at least 10⁻⁷ M; and/or ii) the ratio of the binding affinity of a control TMMP, wherein the control comprises a wild-type immunomodulatory polypeptide, to a cognate co-immunomodulatory polypeptide to the binding affinity of the TMMP comprising a variant of the wild-type immunomodulatory polypeptide to the cognate co-immunomodulatory polypeptide, when measured by bio-layer interferometry, is in a range of from 1.5:1 to 10⁶:1; and wherein the variant immunomodulatory polypeptide comprises 1, 2, 3, 4, 5, 6, 7, 8, 9, 10, 11, 12, 13, 14, 15, 16, 17, 18, 19, or 20 amino acid substitutions compared to the amino acid sequence of the corresponding wild-type immunomodulatory polypeptide; and

[0066] wherein the first polypeptide and/or the second polypeptide comprises an Ig Fc polypeptide or a non-Ig scaffold; and wherein the first and/or the second polypeptide comprises a tumor targeting polypeptide; or

[0067] C) a heterodimer comprising: a) a first polypeptide comprising, in order from N-terminus to C-terminus: i) an epitope; ii) a first MHC polypeptide; and b) a second polypeptide comprising, in order from N-terminus to C-terminus: i) a second MHC polypeptide; and ii) optionally an immunoglobulin (Ig) Fc polypeptide or a non-Ig scaffold, wherein the TMMP comprises one or more immunomodulatory domains that can be the same or different, wherein at least one of the one or more immunomodulatory domain is: A) at the C-terminus of the first polypeptide; B) at the N-terminus of the second polypeptide; C) at the C-terminus of the second polypeptide; or D) at the C-terminus of the first polypeptide and at the N-terminus of the second polypeptide, and wherein at least one of the one or more immunomodulatory domains may be a wild-type immunomodulatory polypeptide or a variant of a wild-type immunomodulatory polypeptide, wherein the variant immunomodulatory polypeptide comprises 1, 2, 3, 4, 5, 6, 7, 8, 9, 10, 11, 12, 13, 14, 15, 16, 17, 18, 19, or 20 amino acid substitutions compared to the amino acid sequence of the corresponding wild-type immunomodulatory polypeptide; and

[0068] optionally wherein at least one of the one or more immunomodulatory domains is a variant immunomodulatory polypeptide that exhibits reduced affinity to a cognate co-immunomodulatory polypeptide compared to the affinity of a corresponding wild-type immunomodulatory polypeptide for the cognate co-immunomodulatory polypeptide, and wherein the epitope binds to a TCR on a T cell with an affinity of at least 10⁻⁷ M, such that: i) the TMMP binds to a first T cell with an affinity that is at least 25% higher than the affinity with which the TMMP binds a second T cell, wherein the first T cell expresses on its surface the cognate co-immunomodulatory polypeptide and a TCR that binds the epitope with an affinity of at least 10⁻⁷ M, and wherein the second T cell expresses on its surface the cognate co-immunomodulatory polypeptide but does not express on its surface a TCR that binds the epitope with an affinity of at least 10⁻⁷ M; and/or ii) the ratio of the binding affinity of a control TMMP, wherein the control comprises a wild-type immunomodulatory polypeptide, to a cognate co-immunomodulatory polypeptide to the binding affinity of the TMMP comprising a variant of the wild-type immunomodulatory polypeptide to the cognate co-immunomodulatory polypeptide, when measured by bio-layer interferometry, is in a range of from 1.5:1 to 10⁶:1; and wherein the variant immunomodulatory polypeptide comprises 1, 2, 3, 4, 5, 6, 7, 8, 9, 10, 11, 12, 13, 14, 15, 16, 17, 18, 19, or 20 amino acid substitutions compared to the amino acid sequence of the corresponding wild-type immunomodulatory polypeptide. The first polypeptide and/or the second polypeptide comprises an Ig Fc polypeptide or a non-Ig scaffold; and wherein the first and/or the second polypeptide comprises a tumor targeting polypeptide. In some cases, the epitope present in a TMMP of the present disclosure presents a cancer-associated epitope. In some cases, the epitope present in a TMMP of the present disclosure presents an infectious disease-associated epitope (e.g., a virus-encoded peptide).

[0069] The present disclosure provides a TMMP comprising: a) a first polypeptide comprising, in order from N-terminus to C-terminus: i) an epitope; ii) a first MHC polypeptide; and b) a second polypeptide comprising, in order from N-terminus to C-terminus: i) a second MHC polypeptide; ii) an Ig Fc polypeptide or a non-Ig scaffold; and iii) a tumor-targeting polypeptide. In some cases, a TMMP of the present disclosure comprises one or more immunomodulatory polypeptides, wherein at least one of the one or more immunomodulatory polypeptides is: A) at the C-terminus of the first polypeptide; B) at the N-terminus of the second polypeptide; C) at the C-terminus of the second polypeptide; or D) at the C-terminus of the first polypeptide and at the N-terminus of the second polypeptide. At least one of the one or more immunomodulatory polypeptides is a variant immunomodulatory polypeptide that exhibits reduced affinity to a cognate co-immunomodulatory polypeptide compared to the affinity of a corresponding wild-type immunomodulatory polypeptide for the cognate co-immunomodulatory polypeptide. The epitope present in a TMMP of the present disclosure binds to a T-cell receptor (TCR) on a T cell with an affinity of at least 100 μM (e.g., at least 10 μM, at least 1 μM, at least 100 nM, at least 10 nM, or at least 1 nM). A TMMP of the present disclosure binds to a first T cell with an affinity that is at least 25% higher than the affinity with which the TMMP binds a second T cell, where the first T cell expresses on its surface the cognate co-immunomodulatory polypeptide and a TCR that binds the epitope with an affinity of at least 100 μM, and where the second T cell expresses on its surface the cognate co-immunomodulatory polypeptide but does not express on its surface a TCR that binds the epitope with an affinity of at least 100 μM (e.g., at least 10 μM, at least 1 μM, at least 100 nM, at least 10 nM, or at least 1 nM).

[0070] In some cases, the epitope present in a TMMP of the present disclosure binds to a TCR on a T cell with an affinity of from about 10⁻⁴M to about 5×10⁻⁴ M, from about 5×10⁻⁴ M to about 10⁻⁵ M, from about 10⁻⁵ M to 5×10⁻⁵ M, from about 5×10⁻⁵ M to 10⁻⁶ M, from about 10⁻⁶ M to about 5×10⁻⁶ M, from about 5×10⁻⁶ M to about 10⁻⁷ M, from about 10⁻⁷ M to about 5×10⁻⁷ M, from about 5×10⁻⁷ M to about 10⁻⁸ M, or from about 10⁻⁸ M to about 10⁻⁹ M. Expressed another way, in some cases, the epitope present in a TMMP of the present disclosure binds to a TCR on a T cell with an affinity of from about 1 nM to about 5 nM, from about 5 nM to about 10 nM, from about 10 nM to about 50 nM, from about 50 nM to about 100 nM, from about 0.1 μM to about 0.5 μM, from about 0.5 μM to about 1 μM, from about 1 μM to about 5 μM, from about 5 μM to about 10 μM, from about 10 μM to about 25 μM, from about 25 μM to about 50 μM, from about 50 μM to about 75 μM, from about 75 μM to about 100 μM.

[0071] In some cases, an immunomodulatory polypeptide present in a TMMP of the present disclosure comprises a wild-type (naturally-occurring) amino acid sequence.

[0072] In some cases, an immunomodulatory polypeptide present in a TMMP of the present disclosure binds to its cognate co-immunomodulatory polypeptide with an affinity that it at least 10% less, at least 15% less, at least 20% less, at least 25% less, at least 30% less, at least 35% less, at least 40% less, at least 45% less, at least 50% less, at least 55% less, at least 60% less, at least 65% less, at least 70% less, at least 75% less, at least 80% less, at least 85% less, at least 90% less, at least 95% less, or more than 95% less, than the affinity of a corresponding wild-type immunomodulatory polypeptide for the cognate co-immunomodulatory polypeptide.

[0073] In some cases, a variant immunomodulatory polypeptide present in a TMMP of the present disclosure has a binding affinity for a cognate co-immunomodulatory polypeptide that is from 1 nM to 100 nM, or from 100 nM to 100 μM. For example, in some cases, a variant immunomodulatory polypeptide present in a TMMP of the present disclosure has a binding affinity for a cognate co-immunomodulatory polypeptide that is from about 100 nM to 150 nM, from about 150 nM to about 200 nM, from about 200 nM to about 250 nM, from about 250 nM to about 300 nM, from about 300 nM to about 350 nM, from about 350 nM to about 400 nM, from about 400 nM to about 500 nM, from about 500 nM to about 600 nM, from about 600 nM to about 700 nM, from about 700 nM to about 800 nM, from about 800 nM to about 900 nM, from about 900 nM to about 1 μM, to about 1 μM to about 5 μM, from about 5 μM to about 10 μM, from about 10 μM to about 15 μM, from about 15 μM to about 20 μM, from about 20 μM to about 25 μM, from about 25 μM to about 50 μM, from about 50 μM to about 75 μM, or from about 75 μM to about 100 μM. In some cases, a variant immunomodulatory polypeptide present in a TMMP of the present disclosure has a binding affinity for a cognate co-immunomodulatory polypeptide that is from about 1 nM to about 5 nM, from about 5 nM to about 10 nM, from about 10 nM to about 50 nM, from about 50 nM to about 100 nM.

[0074] The combination of the reduced affinity of the immunomodulatory polypeptide for its cognate co-immunomodulatory polypeptide, and the affinity of the epitope for a TCR, provides for enhanced selectivity of a TMMP of the present disclosure. For example, a TMMP of the present disclosure binds selectively to a first T cell that displays both: i) a TCR specific for the epitope present in the TMMP; and ii) a co-immunomodulatory polypeptide that binds to the immunomodulatory polypeptide present in the TMMP, compared to binding to a second T cell that displays: i) a TCR specific for an epitope other than the epitope present in the TMMP; and ii) a co-immunomodulatory polypeptide that binds to the immunomodulatory polypeptide present in the TMMP. For example, a TMMP of the present disclosure binds to the first T cell with an affinity that is at least 10%, at least 15%, at least 20%, at least 25%, at least 30%, at least 40%, at least 50%, at least 60%, at least 70%, at least 80%, at least 90%, at least 2-fold, at least 2.5-fold, at least 5-fold, at least 10-fold, at least 15-fold, at least 20-fold, at least 25-fold, at least 50-fold, at least 100-fold, or more than 100-fold, higher than the affinity to which it binds the second T cell.

[0075] In some cases, a TMMP of the present disclosure, when administered to an individual in need thereof, induces both an epitope-specific T cell response and an epitope non-specific T cell response. In other words, in some cases, a TMMP of the present disclosure, when administered to an individual in need thereof, induces an epitope-specific T cell response by modulating the activity of a first T cell that displays both: i) a TCR specific for the epitope present in the TMMP; ii) a co-immunomodulatory polypeptide that binds to the immunomodulatory polypeptide present in the TMMP; and induces an epitope non-specific T cell response by modulating the activity of a second T cell that displays: i) a TCR specific for an epitope other than the epitope present in the TMMP; and ii) a co-immunomodulatory polypeptide that binds to the immunomodulatory polypeptide present in the TMMP. The ratio of the epitope-specific T cell response to the epitope-non-specific T cell response is at least 2:1, at least 5:1, at least 10:1, at least 15:1, at least 20:1, at least 25:1, at least 50:1, or at least 100:1. The ratio of the epitope-specific T cell response to the epitope-non-specific T cell response is from about 2:1 to about 5:1, from about 5:1 to about 10:1, from about 10:1 to about 15:1, from about 15:1 to about 20:1, from about 20:1 to about 25:1, from about 25:1 to about 50:1, or from about 50:1 to about 100:1, or more than 100:1. “Modulating the activity” of a T cell can include one or more of: i) activating a cytotoxic (e.g., CD8⁺) T cell; ii) inducing cytotoxic activity of a cytotoxic (e.g., CD8⁺) T cell; iii) inducing production and release of a cytotoxin (e.g., a perforin; a granzyme; a granulysin) by a cytotoxic (e.g., CD8⁺) T cell; iv) inhibiting activity of an autoreactive T cell; and the like.

[0076] The combination of the reduced affinity of the immunomodulatory polypeptide for its cognate co-immunomodulatory polypeptide, and the affinity of the epitope for a TCR, provides for enhanced selectivity of a TMMP of the present disclosure. Thus, for example, a TMMP of the present disclosure binds with higher avidity to a first T cell that displays both: i) a TCR specific for the epitope present in the TMMP; and ii) a co-immunomodulatory polypeptide that binds to the immunomodulatory polypeptide present in the TMMP, compared to the avidity to which it binds to a second T cell that displays: i) a TCR specific for an epitope other than the epitope present in the TMMP; and ii) a co-immunomodulatory polypeptide that binds to the immunomodulatory polypeptide present in the TMMP.

[0077] Binding affinity between an immunomodulatory polypeptide and its cognate co-immunomodulatory polypeptide can be determined by bio-layer interferometry (BLI) using purified immunomodulatory polypeptide and purified cognate co-immunomodulatory polypeptide. Binding affinity between a TMMP and its cognate co-immunomodulatory polypeptide can be determined by BLI using purified TMMP and the cognate co-immunomodulatory polypeptide. BLI methods are well known to those skilled in the art. See, e.g., Lad et al. (2015) J. Biomol. Screen. 20(4):498-507; and Shah and Duncan (2014) J. Vis. Exp. 18:e51383.

[0078] A BLI assay can be carried out using an Octet RED 96 (Pal FortéBio) instrument, or a similar instrument, as follows. A TMMP (e.g., a TMMP of the present disclosure; a control TMMP (where a control TMMP comprises a wild-type immunomodulatory polypeptide)) is immobilized onto an insoluble support (a “biosensor”). The immobilized TMMP is the “target” Immobilization can be effected by immobilizing a capture antibody onto the insoluble support, where the capture antibody immobilizes the TMMP. For example, immobilization can be effected by immobilizing anti-Fc (e.g., anti-human IgG Fc) antibodies onto the insoluble support, where the immobilized anti-Fc antibodies bind to and immobilize the TMMP (where the TMMP comprises an IgFc polypeptide). A co-immunomodulatory polypeptide is applied, at several different concentrations, to the immobilized TMMP, and the instrument's response recorded. Assays are conducted in a liquid medium comprising 25 mM HEPES pH 6.8, 5% poly(ethylene glycol) 6000, 50 mM KCl, 0.1% bovine serum albumin, and 0.02% Tween 20 nonionic detergent. Binding of the co-immunomodulatory polypeptide to the immobilized TMMP is conducted at 30° C. As a positive control for binding affinity, an anti-MHC Class I monoclonal antibody can be used. For example, anti-HLA Class I monoclonal antibody W6/32 (American Type Culture Collection No. HB-95; Parham et al. (1979) J. Immunol. 123:342), which has a K_{D} of 7 nM, can be used. A standard curve can be generated using serial dilutions of the anti-MHC Class I monoclonal antibody. The co-immunomodulatory polypeptide, or the anti-MHC Class I mAb, is the “analyte.” BLI analyzes the interference pattern of white light reflected from two surfaces: i) from the immobilized polypeptide (“target”); and ii) an internal reference layer. A change in the number of molecules (“analyte”; e.g., co-immunomodulatory polypeptide; anti-HLA antibody) bound to the biosensor tip causes a shift in the interference pattern; this shift in interference pattern can be measured in real time. The two kinetic terms that describe the affinity of the target/analyte interaction are the association constant (kₐ) and dissociation constant (k_{d}). The ratio of these two terms (k_{d/a}) gives rise to the affinity constant K_{D}.

[0079] The BLI assay is carried out in a multi-well plate. To run the assay, the plate layout is defined, the assay steps are defined, and biosensors are assigned in Octet Data Acquisition software. The biosensor assembly is hydrated. The hydrated biosensor assembly and the assay plate are equilibrated for 10 minutes on the Octet instrument. Once the data are acquired, the acquired data are loaded into the Octet Data Analysis software. The data are processed in the Processing window by specifying method for reference subtraction, y-axis alignment, inter-step correction, and Savitzky-Golay filtering. Data are analyzed in the Analysis window by specifying steps to analyze (Association and Dissociation), selecting curve fit model (1:1), fitting method (global), and window of interest (in seconds). The quality of fit is evaluated. K_{D} values for each data trace (analyte concentration) can be averaged if within a 3-fold range. K_{D} error values should be within one order of magnitude of the affinity constant values; R² values should be above 0.95. See, e.g., Abdiche et al. (2008) J. Anal. Biochem. 377:209.

[0080] Unless otherwise stated herein, the affinity of a TMMP of the present disclosure for a cognate co-immunomodulatory polypeptide, or the affinity of a control TMMP (where a control TMMP comprises a wild-type immunomodulatory polypeptide) for a cognate co-immunomodulatory polypeptide, is determined using BLI, as described above.

[0081] In some cases, the ratio of: i) the binding affinity of a control TMMP (where the control comprises a wild-type immunomodulatory polypeptide) to a cognate co-immunomodulatory polypeptide to ii) the binding affinity of a TMMP of the present disclosure comprising a variant of the wild-type immunomodulatory polypeptide to the cognate co-immunomodulatory polypeptide, when measured by BLI (as described above), is at least 1.5:1, at least 2:1, at least 5:1, at least 10:1, at least 15:1, at least 20:1, at least 25:1, at least 50:1, at least 100:1, at least 500:1, at least 10²:1, at least 5×10²:1, at least 10³:1, at least 5×10³:1, at least 10⁴:1, at least 10⁵:1, or at least 10⁶:1. In some cases, the ratio of: i) the binding affinity of a control TMMP (where the control comprises a wild-type immunomodulatory polypeptide) to a cognate co-immunomodulatory polypeptide to ii) the binding affinity of a TMMP of the present disclosure comprising a variant of the wild-type immunomodulatory polypeptide to the cognate co-immunomodulatory polypeptide, when measured by BLI, is in a range of from 1.5:1 to 10⁶:1, e.g., from 1.5:1 to 10:1, from 10:1 to 50:1, from 50:1 to 10²:1, from 10²:1 to 10³:1, from 10³:1 to 10⁴:1, from 10⁴:1 to 10⁵:1, or from 10⁵:1 to 10⁶:1.

[0082] As an example, where a control TMMP comprises a wild-type IL-2 polypeptide, and where a TMMP of the present disclosure comprises a variant IL-2 polypeptide (comprising from 1 to 10 amino acid substitutions relative to the amino acid sequence of the wild-type IL-2 polypeptide) as the immunomodulatory polypeptide, the ratio of: i) the binding affinity of the control TMMP to an IL-2 receptor (i.e., the cognate co-immunomodulatory polypeptide) to ii) the binding affinity of the TMMP of the present disclosure to the IL-2 receptor, when measured by BLI, is at least 1.5:1, at least 2:1, at least 5:1, at least 10:1, at least 15:1, at least 20:1, at least 25:1, at least 50:1, at least 100:1, at least 500:1, at least 10²:1, at least 5×10²:1, at least 10³:1, at least 5×10³:1, at least 10⁴:1, at least 10⁵:1, or at least 10⁶:1. In some cases, where a control TMMP comprises a wild-type IL-2 polypeptide, and where a TMMP of the present disclosure comprises a variant IL-2 polypeptide (comprising from 1 to 10 amino acid substitutions relative to the amino acid sequence of the wild-type IL-2 polypeptide) as the immunomodulatory polypeptide, the ratio of: i) the binding affinity of the control TMMP to an IL-2 receptor (i.e., the cognate co-immunomodulatory polypeptide) to ii) the binding affinity of the TMMP of the present disclosure to the IL-2 receptor, when measured by BLI, is in a range of from 1.5:1 to 10⁶:1, e.g., from 1.5:1 to 10:1, from 10:1 to 50:1, from 50:1 to 10²:1, from 10²:1 to 10³:1, from 10³:1 to 10⁴:1, from 10⁴:1 to 10⁵:1, or from 10⁵:1 to 10⁶:1.

[0083] As another example, where a control TMMP comprises a wild-type PD-L1 polypeptide, and where a TMMP of the present disclosure comprises a variant PD-L1 polypeptide (comprising from 1 to 10 amino acid substitutions relative to the amino acid sequence of the wild-type PD-L1 polypeptide) as the immunomodulatory polypeptide, the ratio of: i) the binding affinity of the control TMMP to a PD-1 polypeptide (i.e., the cognate co-immunomodulatory polypeptide) to ii) the binding affinity of the TMMP of the present disclosure to the PD-1 polypeptide, when measured by BLI, is at least 1.5:1, at least 2:1, at least 5:1, at least 10:1, at least 15:1, at least 20:1, at least 25:1, at least 50:1, at least 100:1, at least 500:1, at least 10²:1, at least 5×10²:1, at least 10³:1, at least 5×10³:1, at least 10⁴:1, at least 10⁵:1, or at least 10⁶:1.

[0084] As another example, where a control TMMP comprises a wild-type CD80 polypeptide, and where a TMMP of the present disclosure comprises a variant CD80 polypeptide (comprising from 1 to 10 amino acid substitutions relative to the amino acid sequence of the wild-type CD80 polypeptide) as the immunomodulatory polypeptide, the ratio of: i) the binding affinity of the control TMMP to a CTLA4 polypeptide (i.e., the cognate co-immunomodulatory polypeptide) to ii) the binding affinity of the TMMP of the present disclosure to the CTLA4 polypeptide, when measured by BLI, is at least 1.5:1, at least 2:1, at least 5:1, at least 10:1, at least 15:1, at least 20:1, at least 25:1, at least 50:1, at least 100:1, at least 500:1, at least 10²:1, at least 5×10²:1, at least 10³:1, at least 5×10³:1, at least 10⁴:1, at least 10⁵:1, or at least 10⁶:1.

[0085] As another example, where a control TMMP comprises a wild-type CD80 polypeptide, and where a TMMP of the present disclosure comprises a variant CD80 polypeptide (comprising from 1 to 10 amino acid substitutions relative to the amino acid sequence of the wild-type CD80 polypeptide) as the immunomodulatory polypeptide, the ratio of: i) the binding affinity of the control TMMP to a CD28 polypeptide (i.e., the cognate co-immunomodulatory polypeptide) to ii) the binding affinity of the TMMP of the present disclosure to the CD28 polypeptide, when measured by BLI, is at least 1.5:1, at least 2:1, at least 5:1, at least 10:1, at least 15:1, at least 20:1, at least 25:1, at least 50:1, at least 100:1, at least 500:1, at least 10²:1, at least 5×10²:1, at least 10³:1, at least 5×10³:1, at least 10⁴:1, at least 10⁵:1, or at least 10⁶:1.

[0086] As another example, where a control TMMP comprises a wild-type 4-1BBL polypeptide, and where a TMMP of the present disclosure comprises a variant 4-1BBL polypeptide (comprising from 1 to 10 amino acid substitutions relative to the amino acid sequence of the wild-type 4-1BBL polypeptide) as the immunomodulatory polypeptide, the ratio of: i) the binding affinity of the control TMMP to a 4-1BB polypeptide (i.e., the cognate co-immunomodulatory polypeptide) to ii) the binding affinity of the TMMP of the present disclosure to the 4-1BB polypeptide, when measured by BLI, is at least 1.5:1, at least 2:1, at least 5:1, at least 10:1, at least 15:1, at least 20:1, at least 25:1, at least 50:1, at least 100:1, at least 500:1, at least 10²:1, at least 5×10²:1, at least 10³:1, at least 5×10³:1, at least 10⁴:1, at least 10⁵:1, or at least 10⁶:1.

[0087] As another example, where a control TMMP comprises a wild-type CD86 polypeptide, and where a TMMP of the present disclosure comprises a variant CD86 polypeptide (comprising from 1 to 10 amino acid substitutions relative to the amino acid sequence of the wild-type CD86 polypeptide) as the immunomodulatory polypeptide, the ratio of: i) the binding affinity of the control TMMP to a CD28 polypeptide (i.e., the cognate co-immunomodulatory polypeptide) to ii) the binding affinity of the TMMP of the present disclosure to the CD28 polypeptide, when measured by BLI, is at least 1.5:1, at least 2:1, at least 5:1, at least 10:1, at least 15:1, at least 20:1, at least 25:1, at least 50:1, at least 100:1, at least 500:1, at least 10²:1, at least 5×10²:1, at least 10³:1, at least 5×10³:1, at least 10⁴:1, at least 10⁵:1, or at least 10⁶:1.

[0088] Binding affinity of a TMMP of the present disclosure to a target T cell can be measured in the following manner: A) contacting a TMMP of the present disclosure with a target T-cell expressing on its surface: i) a cognate co-immunomodulatory polypeptide that binds the parental wild-type immunomodulatory polypeptide; and ii) a T-cell receptor that binds to the epitope, where the TMMP comprises an epitope tag, such that the TMMP binds to the target T-cell; B) contacting the target T-cell-bound TMMP with a fluorescently labeled binding agent (e.g., a fluorescently labeled antibody) that binds to the epitope tag, generating a TMMP/target T-cell/binding agent complex; C) measuring the mean fluorescence intensity (MFI) of the TMMP/target T-cell/binding agent complex using flow cytometry. The epitope tag can be, e.g., a FLAG tag, a hemagglutinin tag, a c-myc tag, a poly(histidine) tag, etc. The MFI measured over a range of concentrations of the TMMP library member provides a measure of the affinity. The MFI measured over a range of concentrations of the TMMP library member provides a half maximal effective concentration (EC₅₀) of the TMMP. In some cases, the EC₅₀, of a TMMP of the present disclosure for a target T cell is in the nM range; and the EC₅₀ of the TMMP for a control T cell (where a control T cell expresses on its surface: i) a cognate co-immunomodulatory polypeptide that binds the parental wild-type immunomodulatory polypeptide; and ii) a T-cell receptor that does not bind to the epitope present in the TMMP) is in the μM range. In some cases, the ratio of the EC₅₀, of a TMMP of the present disclosure for a control T cell to the EC₅₀, of the TMMP for a target T cell is at least 1.5:1, at least 2:1, at least 5:1, at least 10:1, at least 15:1, at least 20:1, at least 25:1, at least 50:1, at least 100:1, at least 500:1, at least 10²:1, at least 5×10²:1, at least 10³:1, at least 5×10³:1, at least 10⁴:1, at lease 10⁵:1, or at least 10⁶:1. The ratio of the EC₅₀, of a TMMP of the present disclosure for a control T cell to the EC₅₀, of the TMMP for a target T cell is an expression of the selectivity of the TMMP.

[0089] In some cases, when measured as described in the preceding paragraph, a TMMP of the present disclosure exhibits selective binding to target T-cell, compared to binding of the TMMP library member to a control T cell that comprises: i) the cognate co-immunomodulatory polypeptide that binds the parental wild-type immunomodulatory polypeptide; and ii) a T-cell receptor that binds to an epitope other than the epitope present in the TMMP library member.

### Dimerized TMMPs

[0090] A TMMP of the present disclosure can be dimerized; i.e., the present disclosure provides a multimeric polypeptide comprising a dimer of a TMMP of the present disclosure. Thus, the present disclosure provides a TMMP comprising: A) a first heterodimer comprising: a) a first polypeptide comprising: i) a peptide epitope; and ii) a first major histocompatibility complex (MHC) polypeptide; and b) a second polypeptide comprising: i) a second MHC polypeptide, wherein the first heterodimer comprises one or more immunomodulatory polypeptides; and B) a second heterodimer comprising: a) a first polypeptide comprising: i) a peptide epitope; and ii) a first MHC polypeptide; and b) a second polypeptide comprising: i) a second MHC polypeptide, wherein the second heterodimer comprises one or more immunomodulatory polypeptides, and wherein the first heterodimer and the second heterodimer are covalently linked to one another. In some cases, the two TMMPs are identical to one another in amino acid sequence. In some cases, the first heterodimer and the second heterodimer are covalently linked to one another via a C-terminal region of the second polypeptide of the first heterodimer and a C-terminal region of the second polypeptide of the second heterodimer. In some cases, first heterodimer and the second heterodimer are covalently linked to one another via the C-terminal amino acid of the second polypeptide of the first heterodimer and the C-terminal region of the second polypeptide of the second heterodimer; for example, in some cases, the C-terminal amino acid of the second polypeptide of the first heterodimer and the C-terminal region of the second polypeptide of the second heterodimer are linked to one another, either directly or via a linker. The linker can be a peptide linker. The peptide linker can have a length of from 1 amino acid to 200 amino acids (e.g., from 1 amino acid (aa) to 5 aa, from 5 aa to 10 aa, from 10 aa to 25 aa, from 25 aa to 50 aa, from 50 aa to 100 aa, from 100 aa to 150 aa, or from 150 aa to 200 aa). In some cases, the peptide epitope of the first heterodimer and the peptide epitope of the second heterodimer comprise the same amino acid sequence. In some cases, the first MHC polypeptide of the first and the second heterodimer is an MHC Class I β2-microglobulin, and wherein the second MHC polypeptide of the first and the second heterodimer is an MHC Class I heavy chain. In some cases, the immunomodulatory polypeptide of the first heterodimer and the immunomodulatory polypeptide of the second heterodimer comprise the same amino acid sequence. In some cases, the immunomodulatory polypeptide of the first heterodimer and the immunomodulatory polypeptide of the second heterodimer are variant immunomodulatory polypeptides that comprise from 1 to 10 amino acid substitutions compared to a corresponding parental wild-type immunomodulatory polypeptide, and wherein the from 1 to 10 amino acid substitutions result in reduced affinity binding of the variant immunomodulatory polypeptide to a cognate co-immunomodulatory polypeptide. In some cases, the immunomodulatory polypeptide of the first heterodimer and the immunomodulatory polypeptide of the second heterodimer are each independently selected from the group consisting of IL-2, 4-1BBL, PD-L1, CD80, CD86, ICOS-L, OX-40L, FasL, JAG1 (CD339), TGFβ, CD70, and ICAM. Examples, of suitable MHC polypeptides, immunomodulatory polypeptides, and peptide epitopes are described below. The first and/or the second polypeptide comprises: i) an Ig Fc polypeptide or a non-Ig scaffold; and ii) a tumor-targeting polypeptide.

### MHC Polypeptides

[0091] As noted above, a TMMP of the present disclosure includes MHC polypeptides. For the purposes of the instant disclosure, the term “major histocompatibility complex (MHC) polypeptides” is meant to include MHC polypeptides of various species, including human MHC (also referred to as human leukocyte antigen (HLA)) polypeptides), rodent (e.g., mouse, rat, etc.) MHC polypeptides, and MHC polypeptides of other mammalian species (e.g., lagomorphs, non-human primates, canines, felines, ungulates (e.g., equines, bovines, ovines, caprines, etc.), and the like. The term “MHC polypeptide” is meant to include Class I MHC polypeptides (e.g., β-2 microglobulin and MHC class I heavy chain).

[0092] In some cases, the first MHC polypeptide is an MHC Class I β2M (β2M) polypeptide, and the second MHC polypeptide is an MHC Class I heavy chain (H chain) (“MHC-H”)). In other instances, the first MHC polypeptide is an MHC Class I heavy chain polypeptide; and the second MHC polypeptide is a β2M polypeptide. In some cases, both the β2M and MHC-H chain are of human origin; i.e., the MHC-H chain is an HLA heavy chain, or a variant thereof. Unless expressly stated otherwise, a TMMP of the present disclosure does not include membrane anchoring domains (transmembrane regions) of an MHC Class I heavy chain, or a part of MHC Class I heavy chain sufficient to anchor the resulting TMMP to a cell (e.g., eukaryotic cell such as a mammalian cell) in which it is expressed. In some cases, the MHC Class I heavy chain present in a TMMP of the present disclosure does not include a signal peptide, a transmembrane domain, or an intracellular domain (cytoplasmic tail) associated with a native MHC Class I heavy chain. Thus, e.g., in some cases, the MHC Class I heavy chain present in a TMMP of the present disclosure includes only the α1, α2, and α3 domains of an MHC Class I heavy chain. In some cases, the MHC Class I heavy chain present in a TMMP of the present disclosure has a length of from about 270 amino acids (aa) to about 290 aa. In some cases, the MHC Class I heavy chain present in a TMMP of the present disclosure has a length of 270 aa, 271 aa, 272 aa, 273 aa, 274 aa, 275 aa, 276 aa, 277 aa, 278 aa, 279 aa, 280 aa, 281 aa, 282 aa, 283 aa, 284 aa, 285 aa, 286 aa, 287 aa, 288 aa, 289 aa, or 290 aa.

[0093] In some cases, an MHC polypeptide of a TMMP is a human MHC polypeptide, where human MHC polypeptides are also referred to as “human leukocyte antigen” (“HLA”) polypeptides. In some cases, an MHC polypeptide of a TMMP is a Class I HLA polypeptide, e.g., a 132-microglobulin polypeptide, or a Class I HLA heavy chain polypeptide. Class I HLA heavy chain polypeptides include HLA-A heavy chain polypeptides, HLA-B heavy chain polypeptides, HLA-C heavy chain polypeptides, HLA-E heavy chain polypeptides, HLA-F heavy chain polypeptides, and HLA-G heavy chain polypeptides.

### MHC Class I Heavy Chains

[0094] In some cases, an MHC Class I heavy chain polypeptide present in a TMMP of the present disclosure comprises an amino acid sequence having at least 75%, at least 80%, at least 85%, at least 90%, at least 95%, at least 98%, at least 99%, or 100%, amino acid sequence identity to all or part (e.g., 50, 75, 100, 150, 200, or 250 contiguous amino acids) of the amino acid sequence of any of the human HLA heavy chain polypeptides depicted in FIGS. 7-13. In some cases, the MHC Class I heavy chain has a length of 270 aa, 271 aa, 272 aa, 273 aa, 274 aa, 275 aa, 276 aa, 277 aa, 278 aa, 279 aa, 280 aa, 281 aa, 282 aa, 283 aa, 284 aa, 285 aa, 286 aa, 287 aa, 288 aa, 289 aa, or 290 aa. In some cases, an MHC Class I heavy chain polypeptide present in a TMMP of the present disclosure comprises 1-30, 1-5, 5-10, 10-15, 15-20, 20-25 or 25-30 amino acid insertions, deletions, and/or substitutions (in addition to those locations indicated as being variable in the heavy chain consensus sequences) of any one of the amino acid sequences depicted in FIGS. 7-13. In some cases, the MHC Class I heavy chain does not include transmembrane or cytoplasmic domains. As an example, a MHC Class I heavy chain polypeptide of a TMMP of the present disclosure can comprise an amino acid sequence having at least 75%, at least 80%, at least 85%, at least 90%, at least 95%, at least 98%, at least 99%, or 100%, amino acid sequence identity to amino acids 25-300 (lacking all, or substantially all, of the leader, transmembrane and cytoplasmic sequence) or amino acids 25-365 (lacking the leader) of a human HLA-A heavy chain polypeptides depicted in any one of FIGS. 5A, 5B, and 5C.

[0095] FIGS. 5A, 5B and 5C provide amino acid sequences of human leukocyte antigen (HLA) Class I heavy chain polypeptides. Signal sequences, amino acids 1-24, are bolded and underlined. FIG. 5A entry: 3A.1 is the HLA-A heavy chain (HLA-A*01:01:01:01 or A*0101) (NCBI accession NP_001229687.1), SEQ ID NO: 35; entry 3A.2 is from HLA-A*1101 SEQ ID NO: 36; entry 3A.3 is from HLA-A*2402 SEQ ID NO: 37 and entry 3A.4 is from HLA-A*3303 SEQ ID NO: 38. FIG. 5B provides the sequence HLA-B*07:02:01 (HLA-B*0702) NCBI GenBank Accession NP_005505.2 (see also GenBank Accession AUV50118.1.). FIG. 5C provides the sequence HLA-C*0701 (GenBank Accession NP_001229971.1) (HLA-C*07:01:01:01 or HLA-Cw*070101, HLA-Cw*07 see GenBank Accession CA078194.1).

[0096] FIG. 6 provides an alignment of eleven mature MHC class I heavy chain amino acid sequences without their leader sequences or transmembrane domains or intracellular domains. The aligned sequences are human HLA-A, HLA-B, and HLA-C, a mouse H2K protein sequence, three variants of HLA-A (var.1, var. 2C, and var.2CP), and 3 human HLA-A variants (HLA-A*1101; HLA-A*2402; and HLA-A*3303). Indicated in the alignment are the locations (84 and 139 of the mature proteins) where cysteine residues may be introduced (e.g., by substitution) for the formation of a disulfide bond to stabilize the MHC H chain—β2M complex. Also shown in the alignment is position 236 (of the mature polypeptide), which may be substituted by a cysteine residue that can form an inter-chain disulfide bond with β2M (e.g., at aa 12). An arrow appears above each of those locations and the residues are bolded. The seventh HLA-A sequence shown in the alignment (var. 2c), shows the sequence of variant 2 substituted with C residues at positions 84, 139 and 236. The boxes flanking residues 84, 139 and 236 show the groups of five amino acids on either sides of those six sets of five residues, denoted aac1 (for “amino acid cluster 1”), aac2 (for “amino acid cluster 2”), aac3 (for “amino acid cluster 3”), aac4 (for “amino acid cluster 4”), aac5 (for “amino acid cluster 5”), and aac6 (for “amino acid cluster 6”), that may be replaced by 1 to 5 amino acids selected independently from (i) any naturally occurring amino acid or (ii) any naturally occurring amino acid except proline or glycine.

[0097] With regard to FIG. 6, in some cases: i) aac1 (amino acid cluster 1) may be the amino acid sequence GTLRG (SEQ ID NO:98) or that sequence with one or two amino acids deleted or substituted with other naturally occurring amino acids (e.g., L replaced by I, V, A or F); ii) aac2 (amino acid cluster 2) may be the amino acid sequence YNQSE (SEQ ID NO:99) or that sequence with one or two amino acids deleted or substituted with other naturally occurring amino acids (e.g., N replaced by Q, Q replaced by N, and/or E replaced by D); iii) aac3 (amino acid cluster 3) may be the amino acid sequence TAADM (SEQ ID NO:100) or that sequence with one or two amino acids deleted or substituted with other naturally occurring amino acids (e.g., T replaced by S, A replaced by G, D replaced by E, and/or M replaced by L, V, or I); iv) aac4 (amino acid cluster 4) may be the amino acid sequence AQTTK (SEQ ID NO:101) or that sequence with one or two amino acids deleted or substituted with other naturally occurring amino acids (e.g., A replaced by G, Q replaced by N, or T replaced by S, and/or K replaced by R or Q); v) aac5 (amino acid cluster 5) may be the amino acid sequence VETRP (SEQ ID NO:102) or that sequence with one or two amino acids deleted or substituted with other naturally occurring amino acids (e.g., V replaced by I or L, E replaced by D, T replaced by S, and/or R replaced by K); and/or vi) aac6 (amino acid cluster 6) may be the amino acid sequence GDGTF (SEQ ID NO:103) or that sequence with one or two amino acids deleted or substituted with other naturally occurring amino acids (e.g., D replaced by E, T replaced by S, or F replaced by L, W, or Y).

[0098] FIGS. 7-9 provide alignments of mature HLA class I heavy chain amino acid sequences (without leader sequences or transmembrane domains or intracellular domains). The aligned amino acid sequences in FIG. 7A are HLA-A class I heavy chains of the following alleles: A*0101, A*0201, A*0301, A*1101, A*2301, A*2402, A*2407, A*3303, and A*3401. The aligned amino acid sequences in FIG. 8A are HLA-B class I heavy chains of the following alleles: B*0702, B*0801, B*1502, B*3802, B*4001, B*4601, and B*5301. The aligned amino acid sequences in FIG. 9A are HLA-C class I heavy chains of the following alleles: C*0102, C*0303, C*0304, C*0401, C*0602, C*0701, C*0801, and C*1502. Indicated in the alignments are the locations (84 and 139 of the mature proteins) where cysteine residues may be introduced (e.g., by substitution) for the formation of a disulfide bond to stabilize the HLA H chain—β2M complex. Also shown in the alignment is position 236 (of the mature polypeptide), which may be substituted by a cysteine residue that can form an inter-chain disulfide bond with β2M (e.g., at aa 12). The boxes flanking residues 84, 139 and 236 show the groups of five amino acids on either sides of those six sets of five residues, denoted aac1 (for “amino acid cluster 1”), aac2 (for “amino acid cluster 2”), aac3 (for “amino acid cluster 3”), aac4 (for “amino acid cluster 4”), aac5 (for “amino acid cluster 5”), and aac6 (for “amino acid cluster 6”), that may be replaced by 1 to 5 amino acids selected independently from (i) any naturally occurring amino acid or (ii) any naturally occurring amino acid except proline or glycine.

[0099] FIGS. 7A, 8A, and 9A provide alignments of the amino acid sequences of mature HLA-A, —B, and -C class I heavy chains, respectively. The sequences are provided for the extracellular portion of the mature protein (without leader sequences or transmembrane domains or intracellular domains). As described in FIG. 6, the positions of aa residues 84, 139, and 236 and their flanking residues (aac1 to aac6) that may be replaced by 1 to 5 amino acids selected independently from (i) any naturally occurring amino acid or (ii) any naturally occurring amino acid except proline or glycine ae also shown. FIGS. 7B, 8B, and 9B provide consensus amino acid sequences for the HLA-A, —B, and -C sequences, respectively, provide in FIGS. 7A, 8A, and 9A. The consensus sequences show the variable amino acid positions as “X” residues sequentially numbered and the locations of amino acids 84, 139 and 236 double underlined.

[0100] With regard to FIG. 7A, in some cases: i) aac1 (amino acid cluster 1) may be the amino acid sequence GTLRG (SEQ ID NO: 98) or that sequence with one or two amino acids deleted or substituted with other naturally occurring amino acids (e.g., L replaced by I, V, A or F); ii) aac2 (amino acid cluster 2) may be the amino acid sequence YNQSE (SEQ ID NO: 99) or that sequence with one or two amino acids deleted or substituted with other naturally occurring amino acids (e.g., N replaced by Q, Q replaced by N, and/or E replaced by D); iii) aac3 (amino acid cluster 3) may be the amino acid sequence TAADM (SEQ ID NO: 100) or that sequence with one or two amino acids deleted or substituted with other naturally occurring amino acids (e.g., T replaced by S, A replaced by G, D replaced by E, and/or M replaced by L, V, or I); iv) aac4 (amino acid cluster 4) may be the amino acid sequence AQTTK (SEQ ID NO: 101) or that sequence with one or two amino acids deleted or substituted with other naturally occurring amino acids (e.g., A replaced by G, Q replaced by N, or T replaced by S, and or K replaced by R or Q); v) aac5 (amino acid cluster 5) may be the amino acid sequence VETRP (SEQ ID NO: 102) or that sequence with one or two amino acids deleted or substituted with other naturally occurring amino acids (e.g., V replaced by I or L, E replaced by D, T replaced by S, and/or R replaced by K); and/or vi) aac6 (amino acid cluster 6) may be the amino acid sequence GDGTF (SEQ ID NO: 103) or that sequence with one or two amino acids deleted or substituted with other naturally occurring amino acids (e.g., D replaced by E, T replaced by S, or F replaced by L, W, or Y).

[0101] With regard to FIG. 8A, in some cases: i) aac1 (amino acid cluster 1) may be the amino acid sequence RNLRG (SEQ ID NO: 104) or that sequence with one or two amino acids deleted or substituted with other naturally occurring amino acids (e.g., N replaced by T or I; and/or L replaced by A; and/or the second R replaced by L; and/or the G replaced by R); ii) aac2 (amino acid cluster 2) may be the amino acid sequence YNQSE (SEQ ID NO: 99) or that sequence with one or two amino acids deleted or substituted with other naturally occurring amino acids (e.g., N replaced by Q, Q replaced by N, and/or E replaced by D); iii) aac3 (amino acid cluster 3) may be the amino acid sequence TAADT (SEQ ID NO:105) or that sequence with one or two amino acids deleted or substituted with other naturally occurring amino acids (e.g., the first T replaced by S; and/or A replaced by G; and/or D replaced by E; and/or the second T replaced by S); iv) aac4 (amino acid cluster 4) may be the amino acid sequence AQITQ (SEQ ID NO:106) or that sequence with one or two amino acids deleted or substituted with other naturally occurring amino acids (e.g., A replaced by G; and/or the first Q replaced by N; and/or I replaced by L or V; and/or the T replaced by S; and/or the second Q replaced by N); v) aac5 (amino acid cluster 5) may be the amino acid sequence VETRP (SEQ ID NO: 102) or that sequence with one or two amino acids deleted or substituted with other naturally occurring amino acids (e.g., V replaced by I or L, E replaced by D, T replaced by S, and/or R replaced by K); and/or vi) aac6 (amino acid cluster 6) may be the amino acid sequence GDRTF (SEQ ID NO:107) or that sequence with one or two amino acids deleted or substituted with other naturally occurring amino acids (e.g., D replaced by E; and/or T replaced by S; and/or R replaced by K or H; and/or F replaced by L, W, or Y).

[0102] With regard to FIG. 9A, in some cases: i) aac1 (amino acid cluster 1) may be the amino acid sequence RNLRG (SEQ ID NO:104) or that sequence with one or two amino acids deleted or substituted with other naturally occurring amino acids (e.g., N replaced by K; and/or L replaced by A or I; and/or the second R replaced by H; and/or the G replaced by T or S); ii) aac2 (amino acid cluster 2) may be the amino acid sequence YNQSE (SEQ ID NO:99) or that sequence with one or two amino acids deleted or substituted with other naturally occurring amino acids (e.g., N replaced by Q, Q replaced by N, and/or E replaced by D); iii) aac3 (amino acid cluster 3) may be the amino acid sequence TAADT (SEQ ID NO:105) or that sequence with one or two amino acids deleted or substituted with other naturally occurring amino acids (e.g., the first T replaced by S; and/or A replaced by G; and/or D replaced by E; and/or the second T replaced by S); iv) aac4 (amino acid cluster 4) may be the amino acid sequence AQITQ (SEQ ID NO:106) or that sequence with one or two amino acids deleted or substituted with other naturally occurring amino acids (e.g., A replaced by G; and/or the first Q replaced by N; and/or I replaced by L; and/or the second Q replaced by N or K); v) aac5 (amino acid cluster 5) may be the amino acid sequence VETRP (SEQ ID NO:102) or that sequence with one or two amino acids deleted or substituted with other naturally occurring amino acids (e.g., V replaced by I or L, E replaced by D, T replaced by S, and/or R replaced by K or H); and/or vi) aac6 (amino acid cluster 6) may be the amino acid sequence GDGTF (SEQ ID NO:103) or that sequence with one or two amino acids deleted or substituted with other naturally occurring amino acids (e.g., D replaced by E; and/or T replaced by S; and/or F replaced by L, W, or Y).

### HLA-A

[0103] In some cases, a TMMP of the present disclosure comprises an HLA-A heavy chain polypeptide. The HLA-A heavy chain peptide sequences, or portions thereof, that may be that may be incorporated into a TMMP of the present disclosure include, but are not limited to, the alleles: A*0101, A*0201, A*0301, A*1101, A*2301, A*2402, A*2407, A*3303, and A*3401, which are aligned without all, or substantially all, of the leader, transmembrane and cytoplasmic sequences in FIG. 7A. Any of those alleles may comprise a mutation at one or more of positions 84, 139 and/or 236 (as shown in FIG. 7A) selected from: a tyrosine to alanine at position 84 (Y84A); a tyrosine to cysteine at position 84 (Y84C); an alanine to cysteine at position 139 (A139C); and an alanine to cysteine substitution at position 236 (A236C). In addition, HLA-A sequence having at least 75% (e.g., at least 80%, at least 85%, at least 90%, at least 95%, at least 98%, at least 99%) or 100% amino acid sequence identity to all or part (e.g., 50, 75, 100, 150, 200, or 250 contiguous amino acids) of the sequence of those HLA-A alleles may also be employed (e.g., it may comprise 1-25, 1-5, 5-10, 10-15, 15-20, 20-25, or 25-30 amino acid insertions, deletions, and/or substitutions).

[0104] In some cases, a TMMP of the present disclosure comprises an HLA-A heavy chain polypeptide comprising the following HLA-A consensus amino acid sequence:

(SEQ ID NO: 61)
GSHSMRYFX1TSVSRPGRGEPRFIAVGYVDDTQFVRFDSDAASQX2MEPR
APWIEQEGPEYWDX3X4TX5X6X7KAX8SQX9X10RX11X12LX13X14
X15X16X17YYNQSEX18GSHTX19QX20MX21GCDVGX22DX23RFLRG
YX24QX25AYDGKDYIALX26EDLRSWTAADMAAQX27TX287X29KWE
X30X31X32EAEQX33RX34YLX35GX36CVX37X38LRRYLENGKETLQ
RTDX39PKTHMTHHX40X41SDHEATLRCWALX42FYPAEITLTWQRDGE
DQTQDTELVETRPAGDGTFQKWAX43VVVPSGX44EQRYTCHVQHEGLPK
PLTLRWEX45,

wherein X1 is F, Y, S, or T; X2 is K or R; X3 is Q, G, E, or R; X4 is N or E; X5 is R or G; X6 is N or K; X7 is M or V; X8 is H or Q; X9 is T or 1; X1.0 is D or H; X11 is A, V, or E; X12 is N or D; X13 is G or R; X14 is T or 1; X15 is L or A; X16 is R or L; X17 is G or R; X18 is A or D; X19 is I, L, or V; X20 is I, R or M; X21 is F or Y; X22 is S or P; X23 is W or G; X24 is R, H, or Q; X25 is D or Y; X26 is N or K; X27 is T or I; X28 is K or Q; X29 is R or H; X30 is A or I; X31 is A or V; X32 is H or R; X33 is R, L, Q, or W; X34 is V or A; X35 is D or E; X36 is R or T; X37 is D or E; X38 is W or G; X39 is P or A; X40 is P or A; X41 is V or I; X42 is S or G; X43 is A or S; X44 is Q or E; and X45 P or L.

[0105] As one example, an MHC Class I heavy chain polypeptide of a TMMP can comprise an amino acid sequence having at least 75%, at least 80%, at least 85%, at least 90%, at least 95%, at least 98%, at least 99%, or 100%, amino acid sequence identity to the following human HLA-A heavy chain amino acid sequence:

(SEQ ID NO: 108)
[sequence omitted]

[0106] In some cases, an HLA-A heavy chain polypeptide suitable for inclusion in a TMMP of the present disclosure comprises the following amino acid sequence:

GSHSMRYFFTSVSRPGRGEPRFIAVGYVDDTQFVRFDSDAASQRMEPRAPWIEQEGPEYWDGET RKVKAHSQTHRVDLGTLRGYYNQSEAGSHTVQRMYGCDVGSDWRFLRGYHQYAYDGKDYIA LKEDLRSWTAADMAAQTTKHKWEAAHVAEQLRAYLEGTCVEWLRRYLENGKETLQRTDAPK THMTHHAVSDHEATLRCWALSFYPAEITLTWQRDGEDQTQDTELVETRPAGDGTFQKWAAVV VPSGQEQRYTCHVQHEGLPKPLTLRWEP (SEQ ID NO:109). This HLA-A heavy chain polypeptide is also referred to as “HLA-A*0201” or simply “HLA-A02.” In some cases, the C-terminal Pro is not included in a TMMP of the present disclosure. For example, in some cases, an HLA-A02 polypeptide suitable for inclusion in a TMMP of the present disclosure comprises the following amino acid sequence:

(SEQ ID NO: 110)
[sequence omitted]

### HLA-A (Y84A; A236C)

[0107] In some cases, the MHC Class I heavy chain polypeptide comprises Y84A and A236C substitutions. For example, in some cases, the MHC Class I heavy chain polypeptide comprises an amino acid sequence having at least 75%, at least 80%, at least 85%, at least 90%, at least 95%, at least 98%, at least 99%, or 100%, amino acid sequence identity to the following human HLA-A heavy chain (Y84A; A236C) amino acid sequence:

GSHSMRYFFTSVSRPGRGEPRFIAVGYVDDTQFVRFDSDAASQRMEPRAPWIEQEGPEYWDGET RKVKAHSQTHRVDLGTLRGAYNQSEAGSHTVQRMYGCDVGSDWRFLRGYHQYAYDGKDYIA LKEDLRSWTAADMAAQTTKHKWEAAHVAEQLRAYLEGTCVEWLRRYLENGKETLQRTDAPK THMTHHAVSDHEATLRCWALSFYPAEITLTWQRDGEDQTQDTELVETRPCGDGTFQKWAAVV VPSGQEQRYTCHVQHEGLPKPLTLRWEP (SEQ ID NO:111), where amino acid 84 is Ala and amino acid 236 is Cys. In some cases, the Cys-236 forms an interchain disulfide bond with Cys-12 of a variant β2M polypeptide that comprises an R12C substitution.

[0108] In some cases, an HLA-A heavy chain polypeptide suitable for inclusion in a TMMP of the present disclosure is an HLA-A02 (Y84A; A236C) polypeptide comprising the following amino acid sequence:

(SEQ ID NO: 112)
GSHSMRYFFTSVSRPGRGEPRFIAVGYVDDTQFVRFDSDAASQRMEPRAP
WIEQEGPEYWDGETRKVKAHSQTHRVDLGTLRGAYNQSEAGSHTVQRMYG
CDVGSDWRFLRGYHQYAYDGKDYIALKEDLRSWTAADMAAQTTKHKWEAA
HVAEQLRAYLEGTCVEWLRRYLENGKETLQRTDAPKTHMTHHAVSDHEAT
LRCWALSFYPAEITLTWQRDGEDQTQDTELVETRPCGDGTFQKWAAVVVP
SGQEQRYTCHVQHEGLPKPLTLRWEP.

[0109] In some cases, an HLA-A heavy chain polypeptide suitable for inclusion in a TMMP of the present disclosure is an HLA-A02 (Y84A; A236C) polypeptide comprising the following amino acid sequence:

(SEQ ID NO: 113)
GSHSMRYFFTSVSRPGRGEPRFIAVGYVDDTQFVRFDSDAASQRMEPRAP
WIEQEGPEYWDGETRKVKAHSQTHRVDLGTLRGAYNQSEAGSHTVQRMYG
CDVGSDWRFLRGYHQYAYDGKDYIALKEDLRSWTAADMAAQTTKHKWEAA
HVAEQLRAYLEGTCVEWLRRYLENGKETLQRTDAPKTHMTHHAVSDHEAT
LRCWALSFYPAEITLTWQRDGEDQTQDTELVETRPCGDGTFQKWAAVVVP
SGQEQRYTCHVQHEGLPKPLTLRWE.

### HLA-A (Y84C; A139C)

[0110] In some cases, the MHC Class I heavy chain polypeptide comprises Y84C and A139C substitutions. For example, in some cases, the MHC Class I heavy chain polypeptide comprises an amino acid sequence having at least 75%, at least 80%, at least 85%, at least 90%, at least 95%, at least 98%, at least 99%, or 100%, amino acid sequence identity to the following human HLA-A heavy chain (Y84C; A139C) amino acid sequence:

GSHSMRYFFTSVSRPGRGEPRFIAVGYVDDTQFVRFDSDAASQRMEPRAPWIEQEGPEYWDGET RKVKAHSQTHRVDLGTLRGCYNQSEAGSHTVQRMYGCDVGSDWRFLRGYHQYAYDGKDYIA LKEDLRSWTAADMCAQTTKHKWEAAHVAEQLRAYLEGTCVEWLRRYLENGKETLQRTDAPK THMTHHAVSDHEATLRCWALSFYPAEITLTWQRDGEDQTQDTELVETRPAGDGTFQKWAAVV VPSGQEQRYTCHVQHEGLPKPLTLRWEP (SEQ ID NO:114), where amino acid 84 is Cys and amino acid 139 is Cys. In some cases, Cys-84 forms an intrachain disulfide bond with Cys-139.

### HLA-A11 (HLA-A*1101)

[0111] As one non-limiting example, an MHC Class I heavy chain polypeptide of a TMMP can comprise an amino acid sequence having at least 75%, at least 80%, at least 85%, at least 90%, at least 95%, at least 98%, at least 99%, or 100%, amino acid sequence identity to the following human HLA-A11 heavy chain amino acid sequence:

GSHSMRYFYTSVSRPGRGEPRFIAVGYVDDTQFVRFDSDAASQRMEPRAPWIEQEGPEYWDQE TRNVKAQSQTDRVDLGTLRGYYNQSEDGSHTIQIMYGCDVGPDGRFLRGYRQDAYDGKDYIA LNEDLRSWTAADMAAQITKRKWEAAHAAEQQRAYLEGTCVEWLRRYLENGKETLQRTDPPKT HMTHHPISDHEATLRCWALGFYPAEITLTWQRDGEDQTQDTELVETRPAGDGTFQKWAAVVV PSGEEQRYTCHVQHEGLPKPLTLRWE (SEQ ID NO:115). Such an MHC Class I heavy chain may be prominent in Asian populations, including populations of individuals of Asian descent.

### HLA-A11 (Y84A; A236C)

[0112] As one non-limiting example, in some cases, the MHC Class I heavy chain polypeptide is an HLA-A11 allele that comprises Y84A and A236C substitutions. For example, in some cases, the MHC Class I heavy chain polypeptide comprises an amino acid sequence having at least 75%, at least 80%, at least 85%, at least 90%, at least 95%, at least 98%, at least 99%, or 100%, amino acid sequence identity to the following human HLA-A A11 heavy chain (Y84A; A236C) amino acid sequence:

[0113] GSHSMRYFYTSVSRPGRGEPRFIAVGYVDDTQFVRFDSDAASQRMEPRAPWIEQEGPEYWDQE TRNVKAQSQTDRVDLGTLRGAYNQSEDGSHTIQIMYGCDVGPDGRFLRGYRQDAYDGKDYIA LNEDLRSWTAADMAAQITKRKWEAAHAAEQQRAYLEGTCVEWLRRYLENGKETLQRTDPPKT HMTHHPISDHEATLRCWALGFYPAEITLTWQRDGEDQTQDTELVETRPCGDGTFQKWAAVVV PSGEEQRYTCHVQHEGLPKPLTLRWE (SEQ ID NO:116), where amino acid 84 is Ala and amino acid 236 is Cys. In some cases, the Cys-236 forms an interchain disulfide bond with Cys-12 of a variant β2M polypeptide that comprises an R12C substitution.

### HLA-A24 (HLA-A*2402)

[0114] As one non-limiting example, an MHC Class I heavy chain polypeptide of a TMMP of the present disclosure can comprise an amino acid sequence having at least 75%, at least 80%, at least 85%, at least 90%, at least 95%, at least 98%, at least 99%, or 100%, amino acid sequence identity to the following human HLA-A24 heavy chain amino acid sequence:

GSHSMRYFSTSVSRPGRGEPRFIAVGYVDDTQFVRFDSDAASQRMEPRAPWIEQEGPEYWDEET GKVKAHSQTDRENLRIALRYYNQSEAGSHTLQMMFGCDVGSDGRFLRGYHQYAYDGKDYIAL KEDLRSWTAADMAAQITKRKWEAAHVAEQQRAYLEGTCVDGLRRYLENGKETLQRTDPPKT HMTHHPISDHEATLRCWALGFYPAEITLTWQRDGEDQTQDTELVETRPAGDGTFQKWAAVVV PSGEEQRYTCHVQHEGLPKPLTLRWEPSSQPTVPIVGIIAGLVLLGAVITGAVVAAVMWRRNSS DRKGGSYSQAASSDSAQGSDVSLTACKV (SEQ ID NO:117). Such an MHC Class I heavy chain may be prominent in Asian populations, including populations of individuals of Asian descent. In some cases, amino acid 84 is an Ala. In some cases, amino acid 84 is a Cys. In some cases, amino acid 236 is a Cys. In some cases, amino acid 84 is an Ala and amino acid 236 is a Cys. In some cases, amino acid 84 is an Cys and amino acid 236 is a Cys.

### HLA-A33 (HLA-A*3303)

[0115] As one non-limiting example, an MHC Class I heavy chain polypeptide of a TMMP of the present disclosure can comprise an amino acid sequence having at least 75%, at least 80%, at least 85%, at least 90%, at least 95%, at least 98%, at least 99%, or 100%, amino acid sequence identity to the following human HLA-A33 heavy chain amino acid sequence:

GSHSMRYFTTSVSRPGRGEPRFIAVGYVDDTQFVRFDSDAASQRMEPRAPWIEQEGPEYWDRN TRNVKAHSQIDRVDLGTLRGYYNQSEAGSHTIQMMYGCDVGSDGRFLRGYQQDAYDGKDYIA LNEDLRSWTAADMAAQITQRKWEAARVAEQLRAYLEGTCVEWLRRYLENGKETLQRTDPPKT HMTHHAVSDHEATLRCWALSFYPAEITLTWQRDGEDQTQDTELVETRPAGDGTFQKWASVVV PSGQEQRYTCHVQHEGLPKPLTLRWEPSSQPTIPIVGIIAGLVLFGAVFAGAVVAAVRWRRKSSD RKGGSYSQAASSDSAQGSDMSLTACKV (SEQ ID NO:118). Such an MHC Class I heavy chain may be prominent in Asian populations, including populations of individuals of Asian descent. In some cases, amino acid 84 is an Ala. In some cases, amino acid 84 is a Cys. In some cases, amino acid 236 is a Cys. In some cases, amino acid 84 is an Ala and amino acid 236 is a Cys. In some cases, amino acid 84 is an Cys and amino acid 236 is a Cys.

### HLA-B

[0116] In some cases, a TMMP of the present disclosure comprises an HLA-B heavy chain polypeptide. The HLA-B heavy chain peptide sequences, or portions thereof, that may be that may be incorporated into a TMMP of the present disclosure include, but are not limited to, the alleles: B*0702, B*0801, B*1502, B*3802, B*4001, B*4601, and B*5301, which are aligned without all, or substantially all, of the leader, transmembrane and cytoplasmic sequences in FIG. 8A. Any of those alleles may comprise a mutation at one or more of positions 84, 139 and/or 236 (as shown in FIG. 8A) selected from: a tyrosine to alanine at position 84 (Y84A); a tyrosine to cysteine at position 84 (Y84C); an alanine to cysteine at position 139 (A139C); and an alanine to cysteine substitution at position 236 (A236C). In addition, a HLA-B polypeptide comprising an amino acid sequence having at least 75% (e.g., at least 80%, at least 85%, at least 90%, at least 95%, at least 98%, at least 99%) or 100% amino acid sequence identity to all or part (e.g., 50, 75, 100, 150, 200, or 250 contiguous amino acids) of the sequence of those HLA-B alleles may also be employed (e.g., it may comprise 1-25, 1-5, 5-10, 10-15, 15-20, 20-25, or 25-30 amino acid insertions, deletions, and/or substitutions).

[0117] In some cases, a TMMP of the present disclosure comprises an HLA-B heavy chain polypeptide comprising the following HLA-B consensus amino acid sequence:

(SEQ ID NO: 69)
GSHSMRYFX1TX2X3SRPGRGEPRFIX4VGYVDDTX5FVRFDSDAX6SPR
X7X8PRAPWIEQEGPEYWDRX9TQX10X11KTX12X13TQX14YX15X16
NLX17X18X19X20YYNQSEAGSHX21X22QX23MYGCDLGPDGRLLRGH
DQSAYDGKDYIALNEDLX24SWTAADTAAQIX25QRKX26EAARX27AEQ
X28RX29YLEGX30CVEWLRRYLENGKX31X32LX33RADPPKTHVTHHP
X34SDHEATLRCWALGFYPAEITLTWQRDGEDQTQDTELVETRPAGDRTF
QKWAAVVVPSGEEQRYTCHVQHEGLPKPLTLRWEP,

wherein X1 is H, Y, or D; X2 is A or S; X3 is M or V; X4 is A, S, or T; X5 is Q or L; X6 is A or T; X7 is E, M K, or T; X8 is A or T; X9 is E or N; X10 is I or K; X11 is Y, F, S, or C; X12 is N or Q; X13 is A or T; X14 is D or Y; X15 is E or V; X16 is S or N; X17 is T, N, or I; X18 is A or L; X19 is L, or R; X20 is R or G; X21 is T or I; X22 is L or I; X23 is R or S; X24 is R or S; X25 is S or T; X26 is L or W; X27 is E OR V; X28 is R, D, L or W; X29 is A or T; X30 is L, E or T; X31 is E or D; X32 is K or T; X33 is E or Q; and X34 is I or V.

[0118] As an example, an MHC Class I heavy chain polypeptide of a TMMP of the present disclosure can comprise an amino acid sequence having at least 75%, at least 80%, at least 85%, at least 90%, at least 95%, at least 98%, at least 99%, or 100%, amino acid sequence identity to the following human HLA-B heavy chain amino acid sequence:

(SEQ ID NO: 119)
[sequence omitted]

### HLA-B (Y84A; A236C)

[0119] As one non-limiting example, in some cases, the MHC Class I heavy chain polypeptide is an HLA-B polypeptide that comprises Y84A and A236C substitutions. For example, in some cases, the MHC Class I heavy chain polypeptide comprises an amino acid sequence having at least 75%, at least 80%, at least 85%, at least 90%, at least 95%, at least 98%, at least 99%, or 100%, amino acid sequence identity to the following human HLA-B heavy chain (Y84A; A236C) amino acid sequence:

GSHSMRYFYTSVSRPGRGEPRFISVGYVDDTQFVRFDSDAASPREEPRAPWIEQEGPEYWDRNT QIYKAQAQTDRESLRNLRGAYNQSEAGSHTLQSMYGCDVGPDGRLLRGHDQYAYDGKDYIAL NEDLRSWTAADTAAQITQRKWEAAREAEQRRAYLEGECVEWLRRYLENGKDKLERADPPKTH VTHHPISDHEATLRCWALGFYPAEITLTWQRDGEDQTQDTELVETRPCGDRTFQKWAAVVVPS GEEQRYTCHVQHEGLPKPLTLRWEP (SEQ ID NO: 121), where amino acid 84 is Ala and amino acid 236 is Cys. In some cases, the Cys-236 forms an interchain disulfide bond with Cys-12 of a variant β2M polypeptide that comprises an R12C substitution.

### HLA-B (Y84C; A139C)

[0120] In some cases, the MHC Class I heavy chain polypeptide comprises Y84C and A139C substitutions. For example, in some cases, the MHC Class I heavy chain polypeptide comprises an amino acid sequence having at least 75%, at least 80%, at least 85%, at least 90%, at least 95%, at least 98%, at least 99%, or 100%, amino acid sequence identity to the following human HLA-B heavy chain (Y84C; A139C) amino acid sequence:

GSHSMRYFYTSVSRPGRGEPRFISVGYVDDTQFVRFDSDAASPREEPRAPWIEQEGPEYWDRNT QIYKAQAQTDRESLRNLRGCYNQSEAGSHTLQSMYGCDVGPDGRLLRGHDQYAYDGKDYIAL NEDLRSWTAADTCAQITQRKWEAAREAEQRRAYLEGECVEWLRRYLENGKDKLERADPPKTH VTHHPISDHEATLRCWALGFYPAEITLTWQRDGEDQTQDTELVETRPAGDRTFQKWAAVVVPS GEEQRYTCHVQHEGLPKPLTLRWEP (SEQ ID NO:122), where amino acid 84 is Cys and amino acid 139 is Cys. In some cases, Cys-84 forms an intrachain disulfide bond with Cys-139.

### HLA-B*0702

[0121] As an example, in some cases, a MHC Class I heavy chain polypeptide present in a TMMP of the present disclosure comprises an amino acid sequence of HLA-B*0702 (SEQ ID NO:62) in FIG. 8A, or a sequence having at least 75% (e.g., at least 80%, at least 85%, at least 90%, at least 95%, at least 98%, at least 99%) or 100%, amino acid sequence identity to all or part (e.g., 50, 75, 100, 150, 200, or 250 contiguous amino acids) of that sequence (e.g., it may comprise 1-25, 1-5, 5-10, 10-15, 15-20, 20-25, or 25-30 amino acid insertions, deletions, and/or substitutions). In some cases, where the HLA-B heavy chain polypeptide of TMMP of the present disclosure has less than 100% identity to the sequence labeled HLA-B in FIG. 6, or labeled “B*0702 in FIG. 8A, it may comprise a mutation at one or more of positions 84, 139 and/or 236 selected from: a tyrosine to alanine substitution at position 84 (Y84A); a tyrosine to cysteine substitution at position 84 (Y84C); an alanine to cysteine at position 139 (A139C); and an alanine to cysteine substitution at position 236 (A236C). In some cases, the HLA-B heavy chain polypeptide of TMMP of the present disclosure comprises Y84A and A236C substitutions. In some cases, the HLA-B*0702 heavy chain polypeptide of TMMP of the present disclosure comprises Y84C and A139C substitutions. In some cases, the HLA-B heavy chain polypeptide of TMMP of the present disclosure comprises Y84C, A139C, and A236C substitutions.

### HLA-C

[0122] In some cases, a TMMP of the present disclosure comprises an HLA-C heavy chain polypeptide. The HLA-C heavy chain polypeptide, or portions thereof, that may be that may be incorporated into a TMMP of the present disclosure include, but are not limited to, the alleles: C*0102, C*0303, C*0304, C*0401, C*0602, C*0701, C*0801, and C*1502, which are aligned without all, or substantially all, of the leader, transmembrane and cytoplasmic sequences in FIG. 9A. Any of those alleles may comprise a mutation at one or more of positions 84, 139 and/or 236 (as shown in FIG. 9A) selected from: a tyrosine to alanine substitution at position 84 (Y84A); a tyrosine to cysteine substitution at position 84 (Y84C); an alanine to cysteine substitution at position 139 (A139C); and an alanine to cysteine substitution at position 236 (A236C). In addition, an HLA-C polypeptide comprising an amino acid sequence having at least 75% (e.g., at least 80%, at least 85%, at least 90%, at least 95%, at least 98%, at least 99%) or 100% amino acid sequence identity to all or part (e.g., 50, 75, 100, 150, 200, or 250 contiguous amino acids) of the sequence of those HLA-C alleles may also be employed (e.g., it may comprise 1-25, 1-5, 5-10, 10-15, 15-20, 20-25, or 25-30 amino acid insertions, deletions, and/or substitutions).

[0123] In some cases, a TMMP of the present disclosure comprises an HLA-C heavy chain polypeptide comprising the following HLA-C consensus amino acid sequence:

[0124] X1SHSMX2YFX3TAVSX4PGRGEPX5FIX6VGYVDDTQFVX7FDSDAASPRGEPRX 8PWVEQEGPEYWDRETQX9YKRQAQX10DRVX11LRX12LRGYYNQSEX13X14SHX15X16QX1 7MX18GCDX19GPDGRLLRGX20X21QX22AYDGKDYIALNEDLRSWTAADTAAQITQRKX23EA ARX24AEQX25RAYLEGX26CVEWLRRYLX27NGKX28TLQRAEX29PKTHVTHHPX30SDHEAT LRCWALGFYPAEITLTWQX31DGEDQTQDTELVETRPAGDGTFQKWAAVX32VPSGX33EQRY TCHX34QHEGLX35EPLTLX36WX37P (SEQ ID NO:79), wherein X1 is C or G; X2 is R or K; X3 is F, Y, S, or D; X4 is R or W; X5 is H or R; X6 is A or S; X7 is Q or R; X8 is A or E; X9 is N or K; X10 is T or A; X11 is S or N; X12 is N or K; X13 is A or D; X14 is G or R; X15 is T or I; X16 is L or I; X17 is W or R; X18 is C, Y, F, or S; X19 is L, or V; X20 is Y or H; X21 is D or N; X22 is Y, F, S, or L; X23 is L or W; X24 is E, A, Or T; X25 is R, L, or W; X26 is L or T; X27 is E OR K; X28 is E or K; X29 is H or P; X30 is R or V; X31 is W or R; X32 is V or M; X33 is E or Q; X34 is M or V; X35 is P or Q; X36 is R or S; and X37 is P or G.

[0125] As an example, an MHC Class I heavy chain polypeptide of a TMMP of the present disclosure can comprise an amino acid sequence having at least 75%, at least 80%, at least 85%, at least 90%, at least 95%, at least 98%, at least 99%, or 100%, amino acid sequence identity to the following human HLA-C heavy chain amino acid sequence:

(SEQ ID NO: 123)
CSHSMRYFDTAVSRPGRGEPRFISVGYVDDTQFVRFDSDAASPRGEPRAP
WVEQEGPEYWDRETQNYKRQAQADRVSLRNLRGYYNQSEDGSHTLQRMYG
CDLGPDGRLLRGYDQSAYDGKDYIALNEDLRSWTAADTAAQITQRKLEAA
RAAEQLRAYLEGTCVEWLRRYLENGKETLQRAEPPKTHVTHHPLSDHEAT
LRCWALGFYPAEITLTWQRDGEDQTQDTELVETRPAGDGTFQKWAAVVVP
SGQEQRYTCHMQHEGLQEPLTLSWEP.

### HLA-C(Y84A; A236C)

[0126] As one non-limiting example, in some cases, the MHC Class I heavy chain polypeptide is an HLA-C polypeptide that comprises Y84A and A236C substitutions. For example, in some cases, the MHC Class I heavy chain polypeptide comprises an amino acid sequence having at least 75%, at least 80%, at least 85%, at least 90%, at least 95%, at least 98%, at least 99%, or 100%, amino acid sequence identity to the following human HLA-C heavy chain (Y84A; A236C) amino acid sequence:

[0127] CSHSMRYFDTAVSRPGRGEPRFISVGYVDDTQFVRFDSDAASPRGEPRAPWVEQEGPEYWDRE TQNYKRQAQADRVSLRNLRGAYNQSEDGSHTLQRMYGCDLGPDGRLLRGYDQSAYDGKDYI ALNEDLRSWTAADTAAQITQRKLEAARAAEQLRAYLEGTCVEWLRRYLENGKETLQRAEPPKT HVTHHPLSDHEATLRCWALGFYPAEITLTWQRDGEDQTQDTELVETRPCGDGTFQKWAAVVV PSGQEQRYTCHMQHEGLQEPLTLSWEP (SEQ ID NO:124), where amino acid 84 is Ala and amino acid 236 is Cys. In some cases, the Cys-236 forms an interchain disulfide bond with Cys-12 of a variant β2M polypeptide that comprises an R12C substitution.

### HLA-C(Y84C; A139C)

[0128] In some cases, the MHC Class I heavy chain polypeptide comprises Y84C and A139C substitutions. For example, in some cases, the MHC Class I heavy chain polypeptide comprises an amino acid sequence having at least 75%, at least 80%, at least 85%, at least 90%, at least 95%, at least 98%, at least 99%, or 100%, amino acid sequence identity to the following human HLA-C heavy chain (Y84C; A139C) amino acid sequence:

CSHSMRYFDTAVSRPGRGEPRFISVGYVDDTQFVRFDSDAASPRGEPRAPWVEQEGPEYWDRE TQNYKRQAQADRVSLRNLRGCYNQSEDGSHTLQRMYGCDLGPDGRLLRGYDQSAYDGKDYI ALNEDLRSWTAADTCAQITQRKLEAARAAEQLRAYLEGTCVEWLRRYLENGKETLQRAEPPKT HVTHHPLSDHEATLRCWALGFYPAEITLTWQRDGEDQTQDTELVETRPAGDGTFQKWAAVVV PSGQEQRYTCHMQHEGLQEPLTLSWEP (SEQ ID NO:125), where amino acid 84 is Cys and amino acid 139 is Cys. In some cases, Cys-84 forms an intrachain disulfide bond with Cys-139.

### HLA-C*0701

[0129] In some cases, a MHC Class I heavy chain polypeptide of a TMMP of the present disclosure comprises an amino acid sequence of HLA-C*0701 of FIG. 9A (labeled HLA-C in FIG. 6), or an amino acid sequence having at least 75% (e.g., at least 80%, at least 85%, at least 90%, at least 95%, at least 98%, at least 99%) or 100% amino acid sequence identity to all or part (e.g., 50, 75, 100, 150, 200, or 250 contiguous amino acids) of that sequence (e.g., it may comprise 1-25, 1-5, 5-10, 10-15, 15-20, 20-25, or 25-30 amino acid insertions, deletions, and/or substitutions). In some cases, where the HLA-C heavy chain polypeptide of a TMMP of the present disclosure has less than 100% identity to the sequence labeled HLA-C*0701 in FIG. 9A, it may comprise a mutation at one or more of positions 84, 139 and/or 236 selected from: a tyrosine to alanine substitution at position 84 (Y84A); a tyrosine to cysteine substitution at position 84 (Y84C); an alanine to cysteine at position 139 (A139C); and an alanine to cysteine substitution at position 236 (A236C). In some cases, the HLA-C heavy chain polypeptide of a TMMP of the present disclosure comprises Y84A and A236C substitutions. In some cases, the HLA-C*0701 heavy chain polypeptide of a T-Cell-MMP or its epitope conjugate comprises Y84C and A139C substitutions. In some cases, the HLA-C heavy chain polypeptide of a TMMP of the present disclosure comprises Y84C, A139C, and A236C substitutions.

Non-classical HLA-E, —F, and -G MHC Class I heavy chains

[0130] In some cases, a TMMP of the present disclosure comprises a non-classical MHC Class I heavy chain polypeptide. Among the non-classical HLA heavy chain polypeptides, or portions thereof, that may be that may be incorporated into a TMMP of the present disclosure include, but are not limited to, those of HLA-E, —F, and -G alleles. Amino acid sequences for HLA-E, —F, and -G heavy chain polypeptides, (and the HLA-A, B and C alleles) may be found on the world wide web hla.alleles.org/nomenclature/index.html, the European Bioinformatics Institute (www(dot)ebi(dot)ac(dot)uk), which is part of the European Molecular Biology Laboratory(EMBL), and at the National Center for Biotechnology Information (www(dot)ncbi(dot)nlm(dot)nih(dot)gov).

[0131] Non-limiting examples of suitable HLA-E alleles include, but are not limited to, HLA-E*0101 (HLA-E*01:01:01:01), HLA-E*01:03(HLA-E*01:03:01:01), HLA-E*01:04, HLA-E*01:05, HLA-E*01:06, HLA-E*01:07, HLA-E*01:09, and HLA-E*01:10. Non-limiting examples of suitable HLA-F alleles include, but are not limited to, HLA-F*0101 (HLA-F*01:01:01:01), HLA-F*01:02, HLA-F*01:03(HLA-F*01:03:01:01), HLA-F*01:04, HLA-F*01:05, and HLA-F*01:06. Non-limiting examples of suitable HLA-G alleles include, but are not limited to, HLA-G*0101 (HLA-G*01:01:01:01), HLA-G*01:02, HLA-G*01:03(HLA-G*01:03:01:01), HLA-G*01:04 (HLA-G*01:04:01:01), HLA-G*01:06, HLA-G*01:07, HLA-G*01:08, HLA-G*01:09: HLA-G*01:10, HLA-G*01:10, HLA-G*01:11, HLA-G*01:12, HLA-G*01:14, HLA-G*01:15, HLA-G*01:16, HLA-G*01:17, HLA-G*01:18: HLA-G*01:19, HLA-G*01:20, and HLA-G*01:22. Consensus sequences for those HLA E, —F and -G alleles without all, or substantially all, of the leader, transmembrane and cytoplasmic sequences are provided in FIG. 10, and aligned with consensus sequences of the above-mentioned HLA-A, —B and -C alleles in FIG. 11.

[0132] FIG. 1—provides a consensus sequence for each of HLA-E, —F, and -G with the variable aa positions indicated as “X” residues sequentially numbered and the locations of aas 84, 139 and 236 double underlined.

[0133] FIG. 11 provides an alignment of the consensus amino acid sequences for HLA-A, -B, -C, -E, —F, and -G, which are given in FIGS. 7-11. Variable residues in each sequence are listed as “X” with the sequential numbering removed. As indicated in FIG. 6, the locations of aas 84, 139 and 236 are indicated with their flanking five-amino acid clusters that may be replaced by 1 to 5 amino acids selected independently from (i) any naturally occurring amino acid or (ii) any naturally occurring amino acid except proline or glycine are also shown.

[0134] Any of the above-mentioned HLA-E, —F, and/or -G alleles may comprise a substitution at one or more of positions 84, 139 and/or 236 as shown in FIG. 11 for the consensus sequences. In some cases, the substitutions may be selected from a: position 84 tyrosine to alanine (Y84A) or cysteine (Y84C), or, in the case of HLA-F, an R84A or R84C substitution; a position 139 alanine to cysteine (A139C), or, in the case of HLA-F, a V139C; and an alanine to cysteine substitution at position 236 (A236C). In addition, an HLA-E, —F and/or -G sequence having at least 75% (e.g., at least 80%, at least 85%, at least 90%, at least 95%, at least 98%, at least 99%) or 100% amino acid sequence identity to all or part (e.g., 50, 75, 100, 150, 200, or 250 contiguous amino acids) of any of the consensus sequences of set forth in FIG. 11 may also be employed (e.g., the sequences may comprise 1-25, 1-5, 5-10, 10-15, 15-20, 20-25, or 25-30 amino acid insertions, deletions, and/or substitutions in addition to changes at variable residues listed therein).

### Mouse H2K

[0135] In some cases, a MHC Class I heavy chain polypeptide present in a TMMP of the present disclosure comprises an amino acid sequence of MOUSE H2K (SEQ ID NO:45) (MOUSE H2K in FIG. 6), or a sequence having at least 75%, at least 80%, at least 85%, at least 90%, at least 95%, at least 98%, at least 99%, or 100% amino acid sequence identity to all or part (e.g., 50, 75, 100, 150, 200, or 250 contiguous amino acids) of that sequence (e.g., it may comprise 1-25, 1-5, 5-10, 10-15, 15-20, 20-25, or 25-30 amino acid insertions, deletions, and/or substitutions). In some cases, where the MOUSE H2K heavy chain polypeptide of a TMMP of the present disclosure has less than 100% identity to the sequence labeled MOUSE H2K in FIG. 6, it may comprise a mutation at one or more of positions 84, 139 and/or 236 selected from: a tyrosine to alanine at position 84 (Y84A); a tyrosine to cysteine at position 84 (Y84C); an alanine to cysteine at position 139 (A139C); and an alanine to cysteine substitution at position 236 (A236C). In some cases, the MOUSE H2K heavy chain polypeptide of a TMMP of the present disclosure comprises Y84A and A236C substitutions. In some cases, the MOUSE H2K heavy chain polypeptide of a TMMP of the present disclosure comprises Y84C and A139C substitutions. In some cases, the MOUSE H2K heavy chain polypeptide of a TMMP of the present disclosure comprises Y84C, A139C and A236C substitutions.

### Exemplary Combinations

[0136] Table 1, below, presents various combinations of MHC Class I heavy chain sequence modifications that can be incorporated in a TMMP of the present disclosure.

TABLE 1

| | | | Specific |
|---|---|---|---|
| | | | Substitutions |
| | HLA | | at aa |
| | Heavy | Sequence | positions |
| | Chain | Identity | 84, 139 |
| Entry | Sequence | Range [symbol] | and/or 236 |
| 1 | HLA-A | 75%-99.8%, 80%-99.8%, | None; Y84C; |
| | Consensus | 85%-99.8%, 90%-99.8%, | Y84A; A139C; |
| | (FIG. 7B) | 95%-99.8%, 98%-99.8%, | A236C; (Y84A & |
| | | or 99%-99.8%; or 1-25, | A236C); (Y84C & |
| | | 1-5, 5-10, 10-15, 15-20, | A139C); or (Y84C, |
| | | or 20-25 aa insertions, de- | A139C & A236C) |
| | | letions, and/or substitutions | |
| | | (not counting variable resi- | |
| | | dues) | |
| 2 | A*0101, A*0201, | 75%-99.8%, 80%-99.8%, | None; Y84C; |
| | A*0301, A*1101, | 85%-99.8%, 90%-99.8%, | Y84A; A139C; |
| | A*2402, A*2301, | 95%-99.8%, 98%-99.8%, | A236C; (Y84A & |
| | A*2402, A*2407, | or 99%-99.8%; or 1-25, | A236C); (Y84C & |
| | A*3303, or | 1-5, 5-10, 10-15, 15-20, | A139C); or (Y84C, |
| | A*3401 | or 20-25 aa insertions, de- | A139C & A236C) |
| | (FIG. 7A) | letions, and/or substitutions | |
| 3 | HLA-B | 75%-99.8%, 80%-99.8%, | None; Y84C; |
| | Consensus | 85%-99.8%, 90%-99.8%, | Y84A; A139C; |
| | (FIG. 8B) | 95%-99.8%, 98%-99.8%, | A236C; (Y84A & |
| | | or 99%-99.8%; or 1-25, 1- | A236C); (Y84C & |
| | | 5, 5-10, 10-15, 15-20, or | A139C); or (Y84C, |
| | | 20-25 aa insertions, dele- | A139C & A236C) |
| | | tions, and/or substitutions | |
| | | (not counting variable resi- | |
| | | dues) | |
| 4 | B*0702, B*0801, | 75%-99.8%, 80%-99.8%, | None; Y84C; |
| | B*1502, B*3802, | 85%-99.8%, 90%-99.8%, | Y84A; A139C; |
| | B*4001, B*4601, | 95%-99.8%, 98%-99.8%, | A236C; (Y84A & |
| | or B*5301 | or 99%-99.8%; or 1-25, 1- | A236C); (Y84C & |
| | (FIG. 8A) | 5, 5-10, 10-15, 15-20, or | A139C); or (Y84C, |
| | | 20-25 aa insertions, dele- | A139C & A236C) |
| | | tions, and/or substitutions | |
| 5 | HLA-C | 75%-99.8%, 80%-99.8%, | None; Y84C; |
| | Consensus | 85%-99.8%, 90%-99.8%, | Y84A; A139C; |
| | (FIG. 9B) | 95%-99.8%, 98%-99.8%, | A236C; (Y84A & |
| | | or 99%-99.8%; or 1-25, 1- | A236C); (Y84C & |
| | | 5, 5-10, 10-15, 15-20, or | A139C); or (Y84C, |
| | | 20-25 aa insertions, dele- | A139C & A236C) |
| | | tions, and/or substitutions | |
| | | (not counting variable | |
| | | residues) | |
| 6 | C*0102, C*0303, | 75%-99.8%, 80%-99.8%, | None; Y84C; |
| | C*0304, C*0401, | 85%-99.8%, 90%-99.8%, | Y84A; A139C; |
| | C*0602, C*0701, | 95%-99.8%, 98%-99.8%, | A236C; (Y84A & |
| | C*0801, or | or 99%-99.8%; or 1-25, 1- | A236C); (Y84C & |
| | C*1502 | 5, 5-10, 10-15, 15-20, or | A139C); or (Y84C, |
| | (FIG. 9A) | 20-25 aa insertions, dele- | A139C & A236C) |
| | | tions, and/or substitutions | |
| 7 | HLA-E, F, or G | 75%-99.8%, 80%-99.8%, | None; Y84C; |
| | Consensus | 85%-99.8%, 90%-99.8%, | Y84A; A139C; |
| | (FIG. 10) | 95%-99.8%, 98%-99.8%, | A236C; (Y84A & |
| | | or 99%-99.8%; or 1-25, 1- | A236C); (Y84C & |
| | | 5, 5-10, 10-15, 15-20, or | A139C); or (Y84C, |
| | | 20-25 aa insertions, dele- | A139C & A236C) |
| | | tions, and/or substitutions | |
| | | (not counting variable | |
| | | residues) | |
| 8 | MOUSE H2K | 75%-99.8%, 80%-99.8%, | None; Y84C; |
| | (FIG. 6) | 85%-99.8%, 90%-99.8%, | Y84A; A139C; |
| | | 95%-99.8%, 98%-99.8%, | A236C; (Y84A & |
| | | or 99%-99.8%; or 1-25, 1- | A236C); (Y84C & |
| | | 5, 5-10, 10-15, 15-20, or | A139C); or (Y84C, |
| | | 20-25 aa insertions, dele- | A139C & A236C) |
| | | tions, and/or substitutions | |

[symbol]

The Sequence Identity Range is the permissible range in sequence identity of a MHC-H polypeptide sequence incorporated into a TMMP relative to the corresponding portion of the sequences listed in FIG. 6-11 not counting the variable residues in the consensus sequences.

### Beta-2 Microglobulin

[0137] A β2-microglobulin (β2M) polypeptide of a TMMP of the present disclosure can be a human β2M polypeptide, a non-human primate β2M polypeptide, a murine β2M polypeptide, and the like. In some instances, a β2M polypeptide comprises an amino acid sequence having at least 75%, at least 80%, at least 85%, at least 90%, at least 95%, at least 98%, at least 99%, or 100%, amino acid sequence identity to a β2M amino acid sequence depicted in FIG. 6. In some instances, a β2M polypeptide comprises an amino acid sequence having at least 75%, at least 80%, at least 85%, at least 90%, at least 95%, at least 98%, at least 99%, or 100%, amino acid sequence identity to amino acids 21 to 119 of a β2M amino acid sequence depicted in FIG. 4.

[0138] In some cases, a suitable β2M polypeptide comprises the following amino acid sequence:

(SEQ ID NO: 126)
IQRTPKIQVY SCHPAENGKS NFLNCYVSGF
HPSDIEVDLLKNGERIEKVE HSDLSFSKDW SFYLLYYTEF
TPTEKDEYAC RVNHVTLSQP KIVKWDRDM;

and the HLA Class I heavy chain polypeptide comprises the following amino acid sequence:

[0139] GSHSMRYFFTSVSRPGRGEPRFIAVGYVDDTQFVRFDSDAASQRMEPRAPWIEQE GPEYWDGETRKVKAHSQTHRVDL(aa1){C}(aa2)AGSHTVQRMYGCDVGSDWRFLRGYHQYAY DGKDYIALKEDLRSW(aa3){C}(aa4))HKWEAAHVAEQLRAYLEGTCVEWLRRYLENGKETLQR TDAPKTHMTHHAVSDHEATLRCWALSFYPAEITLTWQRDGEDQTQDTEL(aa5)(C)(aa6)QKWAA VVVPSGQEQRYTCHVQHEGLPKPLTLRWEP (SEQ ID NO:127), where the cysteine residues indicated as {C} form a disulfide bond between the α1 and α2-1 helices and the (C) residue forms a disulfide bond with the β2M polypeptide cysteine at position 12. In the sequence above, “aa1” is “amino acid cluster 1”; “aa2” is “amino acid cluster 2”; “aa3” is “amino acid cluster 3”; “aa4” is “amino acid cluster 4”; “aa5” is “amino acid cluster 5”; and “aa6” is “amino acid cluster 6”; see, e.g., FIG. 8. Each occurrence of aa1, aa2, aa3, aa4, aa5, and aa6 is and independently selected to be 1-5 amino acid residues, wherein the amino acid residues are i) selected independently from any naturally occurring (e.g., encoded) amino acid or ii) any naturally occurring amino acid except proline or glycine.

[0140] In some cases, an MHC polypeptide comprises a single amino acid substitution relative to a reference MHC polypeptide (where a reference MHC polypeptide can be a wild-type MHC polypeptide), where the single amino acid substitution substitutes an amino acid with a cysteine (Cys) residue. Such cysteine residues, when present in an MHC polypeptide of a first polypeptide of a TMMP of the present disclosure, can form a disulfide bond with a cysteine residue present in a second polypeptide chain of a TMMP of the present disclosure.

[0141] In some cases, a first MHC polypeptide in a first polypeptide of a TMMP of the present disclosure, and/or the second MHC polypeptide in the second polypeptide of a TMMP of the present disclosure, includes an amino acid substitution to substitute an amino acid with a cysteine, where the substituted cysteine in the first MHC polypeptide forms a disulfide bond with a cysteine in the second MHC polypeptide, where a cysteine in the first MHC polypeptide forms a disulfide bond with the substituted cysteine in the second MHC polypeptide, or where the substituted cysteine in the first MHC polypeptide forms a disulfide bond with the substituted cysteine in the second MHC polypeptide.

[0142] For example, in some cases, one of following pairs of residues in an HLA 02-microglobulin and an HLA Class I heavy chain is substituted with cysteines (where residue numbers are those of the mature polypeptide): 1) β2M residue 12, HLA Class I heavy chain residue 236; 2) β2M residue 12, HLA Class I heavy chain residue 237; 3) β2M residue 8, HLA Class I heavy chain residue 234; 4) β2M residue 10, HLA Class I heavy chain residue 235; 5) β2M residue 24, HLA Class I heavy chain residue 236; 6) β2M residue 28, HLA Class I heavy chain residue 232; 7) β2M residue 98, HLA Class I heavy chain residue 192; 8) β2M residue 99, HLA Class I heavy chain residue 234; 9) β2M residue 3, HLA Class I heavy chain residue 120; 10) β2M residue 31, HLA Class I heavy chain residue 96; 11) β2M residue 53, HLA Class I heavy chain residue 35; 12) β2M residue 60, HLA Class I heavy chain residue 96; 13) β2M residue 60, HLA Class I heavy chain residue 122; 14) β2M residue 63, HLA Class I heavy chain residue 27; 15) β2M residue Arg3, HLA Class I heavy chain residue Gly120; 16) β2M residue His31, HLA Class I heavy chain residue Gln96; 17) β2M residue Asp53, HLA Class I heavy chain residue Arg35; 18) β2M residue Trp60, HLA Class I heavy chain residue Gln96; 19) β2M residue Trp60, HLA Class I heavy chain residue Asp122; 20) β2M residue Tyr63, HLA Class I heavy chain residue Tyr27; 21) β2M residue Lys6, HLA Class I heavy chain residue Glu232; 22) β2M residue Gln8, HLA Class I heavy chain residue Arg234; 23) β2M residue Tyr10, HLA Class I heavy chain residue Pro235; 24) β2M residue Ser11, HLA Class I heavy chain residue Gln242; 25) β2M residue Asn24, HLA Class I heavy chain residue Ala236; 26) β2M residue Ser28, HLA Class I heavy chain residue Glu232; 27) β2M residue Asp98, HLA Class I heavy chain residue His192; and 28) β2M residue Met99, HLA Class I heavy chain residue Arg234. The amino acid numbering of the MHC/HLA Class I heavy chain is in reference to the mature MHC/HLA Class I heavy chain, without a signal peptide. For example, in some cases, residue 236 of the mature HLA-A amino acid sequence is substituted with a Cys. In some cases, residue 236 of the mature HLA-B amino acid sequence is substituted with a Cys. In some cases, residue 236 of the mature HLA-C amino acid sequence is substituted with a Cys. In some cases, residue 32 (corresponding to Arg-12 of mature β2M) of an amino acid sequence depicted in FIG. 4 is substituted with a Cys.

[0143] In some cases, a β2M polypeptide comprises the amino acid sequence: IQRTPKIQVY SRHPAENGKS NFLNCYVSGF HPSDIEVDLLKNGERIEKVE HSDLSFSKDW SFYLLYYTEF TPTEKDEYAC RVNHVTLSQP KIVKWDRDM (SEQ ID NO:128). In some cases, a β2M polypeptide comprises the amino acid sequence: IQRTPKIQVY SCHPAENGKS NFLNCYVSGF HPSDIEVDLLKNGERIEKVE HSDLSFSKDW SFYLLYYTEF TPTEKDEYAC RVNHVTLSQP KIVKWDRDM (SEQ ID NO:129).

[0144] In some cases, an HLA Class I heavy chain polypeptide comprises the amino acid sequence:

(SEQ ID NO: 130)
[sequence omitted]

[0145] In some cases, an HLA Class I heavy chain polypeptide comprises the amino acid sequence:

(SEQ ID NO: 131)
GSHSMRYFFTSVSRPGRGEPRFIAVGYVDDTQFVRFDSDAASQRMEPRAP
WIEQEGPEYWDGETRKVKAHSQTHRVDLGTLRGYYNQSEAGSHTVQRMYG
CDVGSDWRFLRGYHQYAYDGKDYIALKEDLRSWTAADMAAQTTKHKWEAA
HVAEQLRAYLEGTCVEWLRRYLENGKETLQRTDAPKTHMTHHAVSDHEAT
LRCWALSFYPAEITLTWQRDGEDQTQDTELVETRPCGDGTFQKWAAVVVP
SGQEQRYTCHVQHEGLPKPLTLRWEP.

[0146] In some cases, an HLA Class I heavy chain polypeptide comprises the amino acid sequence:

(SEQ ID NO: 132)
GSHSMRYFFTSVSRPGRGEPRFIAVGYVDDTQFVRFDSDAASQRMEPRAP
WIEQEGPEYWDGETRKVKAHSQTHRVDLGTLRGAYNQSEAGSHTVQRMYG
CKVGSDWRFLRGYHQYAYDGKDYIALKEDLRSWTAADMAAQTTKHKWEAA
HVAEQLRAYLEGTCVEWLRRYLENGKETLQRTDAPKTHMTHHAVSDHEAT
LRCWALSFYPAEITLTWQRDGEDQTQDTELVETRPCGDGTFQKWAAVVVP
SGQEQRYTCHVQHEGLPKPLTLRWE.

[0147] In some cases, the β2M polypeptide comprises the following amino acid sequence:

(SEQ ID NO: 133)
IQRTPKIQVY SCHPAENGKS NFLNCYVSGF
HPSDIEVDLLKNGERIEKVE HSDLSFSKDW SFYLLYYTEF
TPTEKDEYAC RVNHVTLSQP KIVKWDRDM;

and the HLA Class I heavy chain polypeptide of a TMMP of the present disclosure comprises the following amino acid sequence:

[0148] GSHSMRYFFTSVSRPGRGEPRFIAVGYVDDTQFVRFDSDAASQRMEPRAPWIEQE GPEYWDGETRKVKAHSQTHRVDLGTLRGYYNQSEAGSHTVQRMYGCDVGSDWRFLRGYHQY AYDGKDYIALKEDLRSWTAADMAAQTTKHKWEAAHVAEQLRAYLEGTCVEWLRRYLENGKE TLQRTDAPKTHMTHHAVSDHEATLRCWALSFYPAEITLTWQRDGEDQTQDTELVETRPCGDGT FQKWAAVVVPSGQEQRYTCHVQHEGLPKPLTLRWEP (SEQ ID NO:134), where the Cys residues that are underlined and in bold form a disulfide bond with one another in the TMMP.

[0149] In some cases, the β2M polypeptide comprises the amino acid sequence:

(SEQ ID NO: 135)
IQRTPKIQVYSCHPAENGKSNFLNCYVSGFHPSDIEVDLLKNGERIEKVE
HSDLSFSKDWSFYLLYYTEFTPTEKDEYACRVNHVTLSQPKIVKWDRDM.

[0150] In some cases, the first polypeptide and the second polypeptide of a TMMP of the present disclosure are disulfide linked to one another through: i) a Cys residue present in a linker connecting the peptide epitope and a β2M polypeptide in the first polypeptide chain; and ii) a Cys residue present in an MHC Class I heavy chain in the second polypeptide chain. In some cases, the Cys residue present in the MHC Class I heavy chain is a Cys introduced as a Y84C substitution. In some cases, the linker connecting the peptide epitope and the β2M polypeptide in the first polypeptide chain is GCGGS(G4S)n (SEQ ID NO:136), where n is 1, 2, 3, 4, 5, 6, 7, 8, or 9. For example, in some cases, the linker comprises the amino acid sequence GCGGSGGGGSGGGGSGGGGS (SEQ ID NO:137). As another example, the linker comprises the amino acid sequence GCGGSGGGGSGGGGS (SEQ ID NO:138). Examples of disulfide-linked first and second polypeptides of a TMMP of the present disclosure are depicted schematically in FIG. 2A-2F.

### Multiple Disulfide Bonded TMMPs

[0151] In some cases, the first polypeptide and the second polypeptide of a TMMP of the present disclosure are linked to one another by at least two disulfide bonds (i.e., two interchain disulfide bonds). Examples of such multiple disulfide-linked TMMP are depicted schematically in FIGS. 12A and 12B. In addition, where a TMMP of the present disclosure comprises an IgFc polypeptide, a heterodimeric TMMP can be dimerized, such that disulfide bonds link the IgFc polypeptides in the two heterodimeric TMMPs. Such an arrangement is depicted schematically in FIGS. 12C and 12D, where disulfide bonds are represented by dashed lines. Unless otherwise stated, the at least two disulfide bonds described in the multiple disulfide-linked TMMPPs in this section are not referring to disulfide bonds linking IgFc polypeptides in dimerized TMMPs.

[0152] As noted above, in some cases, the first polypeptide and the second polypeptide of a TMMP of the present disclosure are linked to one another by at least two disulfide bonds (i.e., two interchain disulfide bonds). For example, in some instances, the first polypeptide and the second polypeptide of a TMMP of the present disclosure are linked to one another by 2 interchain disulfide bonds. As another example, in some instances, the first polypeptide and the second polypeptide of a TMMP of the present disclosure are linked to one another by 3 interchain disulfide bonds. As another example, in some instances, the first polypeptide and the second polypeptide of a TMMP of the present disclosure are linked to one another by 4 interchain disulfide bonds.

[0153] In some cases where a peptide epitope in a first polypeptide of a TMMP of the present disclosure is linked to a β2M polypeptide by a linker comprising a Cys, at least one of the at least two disulfide bonds links a Cys in the linker to a Cys in an MHC Class I heavy chain in the second polypeptide. In some cases, where a peptide epitope in a first polypeptide of a TMMP of the present disclosure is linked to an MHC Class I heavy chain polypeptide by a linker, at least one of the at least two disulfide bonds links a Cys in the linker to a Cys in a 2M polypeptide present in the second polypeptide.

[0154] In some cases, a multiple disulfide-linked TMMP of the present disclosure (e.g., a double disulfide-linked TMMP) exhibits increased stability, compared to a control TMMP that includes only one of the at least two disulfide bonds. In some cases, a multiple disulfide-linked TMMP (e.g., a double disulfide-linked TMMP) of the present disclosure exhibits increased in vitro stability, compared to a control TMMP that includes only one of the at least two disulfide bonds. For example, in some cases, a multiple disulfide-linked TMMP of the present disclosure (e.g., a double disulfide-linked TMMP) exhibits at least 5%, at least 10%, at least 15%, at least 20%, at least 25%, at least 50%, at least 2-fold, at least 5-fold, or at least 10-fold, greater in vitro stability, compared to a control TMMP that includes only one of the at least two disulfide bonds.

[0155] Whether a multiple disulfide-linked TMMP of the present disclosure exhibits increased in vitro stability, compared to a control TMMP that includes only one of the at least two disulfide bonds, can be determined by measuring the amount disulfide-linked heterodimeric TMMP present in a sample over time and/or under a specified condition and/or during purification of the TMMP.

[0156] For example, in some cases, a multiple disulfide-linked TMMP (e.g., a double disulfide-linked TMMP) of the present disclosure exhibits at least 5%, at least 10%, at least 15%, at least 20%, at least 25%, at least 50%, at least 2-fold, at least 5-fold, or at least 10-fold, greater in vitro stability, compared to a control TMMP that includes only one of the at least two disulfide bonds, when the TMMP is stored at 37° C. for a period of time (e.g., for a period of time of from about 1 week to about 2 weeks, from about 2 weeks to about 4 weeks, or from about 4 weeks to about 2 months). For example, in some cases, the amount of disulfide-linked heterodimeric TMMP remaining after storing a multiple disulfide-linked TMMP (e.g., a double disulfide-linked TMMP) of the present disclosure in vitro at 37° C. for 28 days is at least at least 5%, at least 10%, at least 15%, at least 20%, at least 25%, at least 50%, at least 2-fold, at least 5-fold, or at least 10-fold, greater than the amount of disulfide-linked heterodimeric TMMP remaining after storing a control TMMP (a TMMP that includes only one of the at least two disulfide bonds present in the multiple disulfide-linked TMMP) in vitro at 37° C. for 28 days.

[0157] In some cases, a multiple disulfide-linked TMMP of the present disclosure exhibits increased in vivo stability, compared to a control TMMP that includes only one of the at least two disulfide bonds. For example, in some cases, a multiple disulfide-linked TMMP of the present disclosure exhibits at least 5%, at least 10%, at least 15%, at least 20%, at least 25%, at least 50%, at least 2-fold, at least 5-fold, or at least 10-fold, greater in vivo stability, compared to a control TMMP that includes only one of the at least two disulfide bonds.

[0158] In some cases, the presence of two disulfide bonds in a multiple disulfide-linked TMMP of the present disclosure (e.g., a double disulfide-linked TMMP) provides for increased production of disulfide-linked heterodimeric TMMP, compared to the amount of disulfide-linked heterodimeric TMMP produced when the TMMP is a control TMMP that includes only one of the at least two disulfide bonds. For example, a multiple disulfide-linked TMMP of the present disclosure (e.g., a double disulfide-linked TMMP) can be produced in a mammalian cell in in vitro cell culture, where the mammalian cell is cultured in a liquid cell culture medium. The TMMP can be secreted into the cell culture medium. The cells can be lysed, generating a cell lysate, and the TMMP can be present in the cell lysate. The TMMP can be purified from the cell culture medium and/or the cell lysate. For example, where the TMMP comprises an IgG1 Fc polypeptide, the cell culture medium and/or the cell lysate can be contacted with immobilized protein A (e.g., the cell culture medium and/or the cell lysate can be applied to a protein A column, where protein A is immobilized onto beads). TMMP present in the cell culture medium and/or the cell lysate becomes bound to the immobilized protein A. After washing the column to remove unbound materials, the bound TMMP is eluted, generating a protein A eluate. The amount of disulfide-linked heterodimeric TMMP present in the protein A eluate is a least 0.5%, at least 1%, at least 2%, at least 3%, at least 4%, at least 5%, at least 6%, at least 7%, at least 8%, at least 9%, or at least 10%, higher than the amount of disulfide-linked heterodimeric TMMP present in the protein A eluate when the TMMP is a control TMMP that includes only one of the at least two disulfide bonds present in the multiple disulfide-linked TMMP (e.g., a double disulfide-linked TMMP). In some cases, the percent of the total TMMP protein in the eluate that is non-aggregated disulfide-linked heterodimeric TMMP is at least 70%, at least 75%, at least 80%, at least 85%, at least 90%, at least 95%, or at least 99%. The protein A eluate can be subjected to size exclusion chromatography (SEC) and/or one or more other additional purification steps.

[0159] In some cases, a T-cell modulatory multimeric polypeptide of the present disclosure comprises at least one heterodimer comprising: a) a first polypeptide comprising: i) a peptide epitope; and ii) first MHC polypeptide; b) a second polypeptide comprising a second MHC polypeptide; c) at least one immunomodulatory polypeptide, where the first and/or the second polypeptide comprises the at least one immunomodulatory polypeptide; d) an Ig Fc polypeptide or a non-Ig scaffold, where the first and/or the second polypeptide comprises the Ig Fc polypeptide or the non-Ig scaffold; and e) a TTP, where the first and/or the second polypeptide comprises the TTP; and where the heterodimer comprises at least two disulfide bonds (e.g., two disulfide bonds) between the first polypeptide and the second polypeptide (e.g., the heterodimer comprises: i) a first disulfide bond linking the first polypeptide and the second polypeptide; and ii) a second disulfide bond linking the first polypeptide and the second polypeptide). Expressed another way, the first polypeptide comprises a first Cys residue that forms a disulfide bond (a first disulfide bond) with a first Cys residue in the second polypeptide; and the first polypeptide comprises a second Cys residue that forms a disulfide bond (a second disulfide bond) with a second Cys residue in the second polypeptide.

[0160] In some cases, a TMMP of the present disclosure comprises: a) a first polypeptide comprising, in order from N-terminus to C-terminus: i) a peptide epitope; ii) a peptide linker; and iii) a β2M polypeptide; and b) a second polypeptide comprising an MHC Class I heavy chain polypeptide, where one or both of the first and the second polypeptides comprises at least one immunomodulatory polypeptide, where the TMMP comprises: a) a first disulfide linkage between: i) a Cys present in the linker between the peptide epitope and the 12M polypeptide; and ii) a first Cys introduced into the MHC Class I heavy chain polypeptide; and b) at least a second disulfide linkage between the first polypeptide and the second polypeptide, where the at least a second disulfide linkage is between: i) a Cys in the first polypeptide that is C-terminal to the Cys present in the linker; and ii) a Cys in the second polypeptide that is C-terminal to the first Cys introduced into the MHC Class I heavy chain polypeptide. As noted above, the TMMP also includes: i) an Ig Fe polypeptide or a non-Ig scaffold; and ii) a TTP.

[0161] In some cases, a first and a second disulfide bond-forming Cys residues in a first or a second polypeptide of a TMMP of the present disclosure are from about 10 amino acids to about 200 amino acids apart from one another. For example, in some cases, a first and a second disulfide bond-forming Cys residues in a first or a second polypeptide of a TMMP are from about 10 amino acids (aa) to about 15 aa, from about 15 aa to about 20 aa, from about 20 aa to about 25 aa, from about 25 aa to about 30 aa, from about 30 aa to about 40 aa, from about 40 aa to about 50 aa, from about 50 aa to about 60 aa, from about 60 aa to about 70 aa, from about 70 aa to about 80 aa, from about 80 aa to about 90 aa, from about 90 aa to about 100 aa, from about 100 aa to about 110 aa, from about 110 aa to about 120 aa, from about 120 aa to about 130 aa, from about 130 aa to about 140 aa, from about 140 aa to about 150 aa, from about 150 aa to about 160 aa, from about 160 aa to about 170 aa, from about 170 aa to about 180 aa, from about 180 aa to about 190 aa, or from about 190 aa to about 200 aa.

[0162] As an example, in some cases, the first and second disulfide bond-forming Cys residues in the first polypeptide of a TMMP of the present disclosure are from about 10 amino acids to about 80 amino acid residues apart from one another. For example, in some cases, the second disulfide bond-forming Cys residue in the first polypeptide is from about 10 amino acids to about 80 amino acids (e.g., from about 10 amino acids (aa) to about 15 aa, from about 15 aa to about 20 aa, from about 20 aa to about 25 aa, from about 25 aa to about 30 aa, from about 30 aa to about 40 aa, from about 40 aa to about 50 aa, from about 50 aa to about 60 aa, from about 60 aa to about 70 aa, or from about 70 aa to about 80 aa) C-terminal to the first disulfide bond-forming Cys residue in the first polypeptide. In some cases, the second disulfide bond-forming Cys residue in the first polypeptide is 10 aa, 11 aa, 12 aa, 13 aa, 14 aa, 15 aa, 16 aa, 17 aa, 18 aa, 19 aa, 20 aa, 21 aa, 22 aa, 23 aa, 24 aa, or 25 aa, C-terminal to the first disulfide bond-forming Cys residue in the first polypeptide. In some cases, the second disulfide bond-forming Cys residue in the first polypeptide is 15 aa C-terminal to the first disulfide bond-forming Cys residue in the first polypeptide. In some cases, the second disulfide bond-forming Cys residue in the first polypeptide is 20 aa C-terminal to the first disulfide bond-forming Cys residue in the first polypeptide. In some cases, the second disulfide bond-forming Cys residue in the first polypeptide is 25 aa C-terminal to the first disulfide bond-forming Cys residue in the first polypeptide.

[0163] As another example, in some cases, the first and second disulfide bond-forming Cys residues in the second polypeptide of a TMMP of the present disclosure are from about 140 amino acids to about 160 amino acids apart from one another. For example, in some cases, the second disulfide bond-forming Cys residue in the second polypeptide is from about 140 amino acids to about 160 amino acids C-terminal to the first disulfide bond-forming Cys residue in the second polypeptide. In some cases, the second disulfide bond-forming Cys residue in the second polypeptide is 140 amino acids (aa), 141 aa, 142 aa, 143 aa, 144 aa, 145 aa, 146 aa, 147 aa, 148 aa, 149 aa, 150 aa, 151 aa, 152 aa, 153 aa, 154 aa, 155 aa, 156 aa, 157 aa, 158 aa, 159 aa, or 160 aa, C-terminal to the first disulfide bond-forming Cys residue in the second polypeptide.

[0164] A multiple disulfide-linked TMMP of the present disclosure (e.g., a double disulfide-linked TMMP) can comprise, for example: a) a first polypeptide comprising: i) a peptide epitope; and ii) a first MHC polypeptide, where the first polypeptide comprises a peptide linker between the peptide and the first MHC polypeptide, where the peptide linker comprises a Cys residue, and where the first MHC polypeptide is a β2M polypeptide that comprises an amino acid substitution that introduces a Cys residue; b) and a second polypeptide comprising a second MHC polypeptide, where the second MHC polypeptide is a Class I heavy chain comprising a Y84C substitution and an A236C substitution, based on the amino acid numbering of HLA-A*0201 (depicted in FIG. 7A), or at corresponding positions in another Class I heavy chain allele, where the TMMP comprises a disulfide bond between the Cys residue in the peptide linker and the Cys residue at amino acid position 84 of the Class I heavy chain or corresponding position of another Class I heavy chain allele, and where the TMMP comprises a disulfide bond between the introduced Cys residue in the β2M polypeptide and the Cys at amino acid position 236 of the Class I heavy chain or corresponding position of another Class I heavy chain allele; and c) at least one immunomodulatory polypeptide, where the first and/or the second polypeptide comprises the at least one immunomodulatory polypeptide. Examples are depicted schematically in FIG. 12A and FIG. 12B. As noted above, the TMMP also includes: i) an Ig Fc polypeptide or a non-Ig scaffold; and ii) a TTP.

[0165] In some cases, the peptide linker comprises the amino acid sequence GCGGS (SEQ ID NO:139). In some cases, the peptide linker comprises the amino acid sequence GCGGS(GGGGS)n (SEQ ID NO: 140), where n is an integer from 1 to 10. In some cases, the peptide linker comprises the amino acid sequence GCGGS(GGGGS)n (SEQ ID NO: 140), where n is 1. In some cases, the peptide linker comprises the amino acid sequence GCGGS(GGGGS)n (SEQ ID NO: 140), where n is 2. In some cases, the peptide linker comprises the amino acid sequence GCGGS(GGGGS)n (SEQ ID NO: 140), where n is 3. In some cases, the peptide linker comprises the amino acid sequence GCGGS(GGGGS)n (SEQ ID NO: 140), where n is 4. In some cases, the peptide linker comprises the amino acid sequence GCGGS(GGGGS)n (SEQ ID NO: 140), where n is 5. In some cases, the peptide linker comprises the amino acid sequence GCGGS(GGGGS)n (SEQ ID NO: 140), where n is 6. In some cases, the peptide linker comprises the amino acid sequence GCGGS(GGGGS)n (SEQ ID NO: 140), where n is 7. In some cases, the peptide linker comprises the amino acid sequence GCGGS(GGGGS)n (SEQ ID NO: 140), where n is 8. In some cases, the peptide linker comprises the amino acid sequence GCGGS(GGGGS)n (SEQ ID NO: 140), where n is 9. In some cases, the peptide linker comprises the amino acid sequence GCGGS(GGGGS)n (SEQ ID NO: 140), where n is 10.

[0166] In some cases, the peptide linker comprises the amino acid sequence CGGGS (SEQ ID NO:141). In some cases, the peptide linker comprises the amino acid sequence CGGGS(GGGGS)n (SEQ ID NO: 142), where n is an integer from 1 to 10. In some cases, the peptide linker comprises the amino acid sequence CGGGS(GGGGS)n (SEQ ID NO: 142), where n is 1. In some cases, the peptide linker comprises the amino acid sequence CGGGS(GGGGS)n (SEQ ID NO: 142), where n is 2. In some cases, the peptide linker comprises the amino acid sequence CGGGS(GGGGS)n (SEQ ID NO: 142), where n is 3. In some cases, the peptide linker comprises the amino acid sequence CGGGS(GGGGS)n (SEQ ID NO: 142), where n is 4. In some cases, the peptide linker comprises the amino acid sequence CGGGS(GGGGS)n (SEQ ID NO: 142), where n is 5. In some cases, the peptide linker comprises the amino acid sequence CGGGS(GGGGS)n (SEQ ID NO: 142), where n is 6. In some cases, the peptide linker comprises the amino acid sequence CGGGS(GGGGS)n (SEQ ID NO: 142), where n is 7. In some cases, the peptide linker comprises the amino acid sequence CGGGS(GGGGS)n (SEQ ID NO: 142), where n is 8. In some cases, the peptide linker comprises the amino acid sequence CGGGS(GGGGS)n (SEQ ID NO: 142), where n is 9. In some cases, the peptide linker comprises the amino acid sequence CGGGS(GGGGS)n (SEQ ID NO: 142), where n is 10.

[0167] The following are non-limiting examples of MHC Class I heavy chain comprising a Y84C substitution and an A236C substitution, based on the amino acid numbering of HLA-A*0201 (depicted in FIG. 7A), or at corresponding positions in another Class I heavy chain allele. HLA-A

[0168] In some cases, a multiple disulfide-linked TMMP of the present disclosure (e.g., a double disulfide-linked TMMP) comprises: a) a first polypeptide comprising: i) a peptide epitope; and ii) a first MHC polypeptide, where the first polypeptide comprises a peptide linker between the peptide epitope and the first MHC polypeptide, where the peptide linker comprises a Cys residue, and where the first MHC polypeptide is a β2M polypeptide that comprises an amino acid substitution that introduces a Cys residue; and b) a second polypeptide comprising an HLA-A MHC Class I heavy chain comprising an amino acid sequence having at least 60%, at least 70%, at least 80%, at least 90%, at least 95%, at least 98%, at least 99%, or 100%, amino acid sequence identity to the following amino acid sequence:

GSHSMRYFFTSVSRPGRGEPRFIAVGYVDDTQFVRFDSDAASQRMEPRAPWIEQEGPEYWDGET RKVKAHSQTHRVDLGTLRGCYNQSEAGSHTVQRMYGCDVGSDWRFLRGYHQYAYDGKDYIA LKEDLRSWTAADMAAQTTKHKWEAAHVAEQLRAYLEGTCVEWLRRYLENGKETLQRTDAPK THMTHHAVSDHEATLRCWALSFYPAEITLTWQRDGEDQTQDTELVETRPCGDGTFQKWAAVV VPSGQEQRYTCHVQHEGLPKPLTLRWEP (SEQ ID NO:143), where amino acid 84 is a Cys and amino acid 236 is a Cys; and c) at least one immunomodulatory polypeptide, where the first and/or the second polypeptide comprises the at least one immunomodulatory polypeptide. In some cases, the peptide linker comprises the amino acid sequence GCGGS (SEQ ID NO:139). In some cases, the peptide linker comprises the amino acid sequence GCGGS(GGGGS)n (SEQ ID NO:140), where n is an integer from 1 to 10. In some cases, the β2M polypeptide comprises an R12C substitution. For example, the β2M polypeptide can comprises an amino acid sequence having at least 90%, at least 95%, at least 98%, at least 99%, or 100%, amino acid sequence identity to the following amino acid sequence:
IQRTPKIQVYSCHPAENGKSNFLNCYVSGFHPSDIEVDLLKNGERIEKVEHSDLSFSKDWSFYLL YYTEFTPTEKDEYACRVNHVTLSQPKIVKWDRDM (SEQ ID NO:144), where amino acid 12 is a Cys. The at least one immunomodulatory polypeptide can be a cytokine, a 4-1BBL polypeptide, a B7-1 polypeptide; a B7-2 polypeptide, an ICOS-L polypeptide, an OX-40L polypeptide, a CD80 polypeptide, a CD86 polypeptide, a PD-L1 polypeptide, a FasL polypeptide, or a PD-L2 polypeptide. In some cases, the at least one immunomodulatory polypeptide is a reduced affinity variant, as described elsewhere herein. As noted above, the TMMP also includes: i) an Ig Fc polypeptide or a, non-Ig scaffold; and ii) a TTP.

[0169] In some cases, a multiple disulfide-linked TMMP of the present disclosure (e.g., a double disulfide-linked TMMP) comprises an HLA-A Class I heavy chain polypeptide. In some cases, the HLA-A heavy chain polypeptide present in a multiple disulfide-linked TMMP of the present disclosure (e.g., a double disulfide-linked TMMP) comprises an amino acid sequence having at least 95%, at least 98%, or at least 99%, amino acid sequence identity to the HLA-A*0101, HLA-A*0201, HLA-A*0202, HLA-A*1101, HLA-A*2301, HLA-A*2402, HLA-A*2407, HLA-A*3303, or HLA-A*3401 amino acid sequence depicted in FIG. 7A, where the HLA-A heavy chain polypeptide comprises Y84C and A236C substitutions.

### HLA-A*0101 (Y84C; A236C)

[0170] In some cases, the HLA-A heavy chain polypeptide present in a multiple disulfide-linked TMMP of the present disclosure (e.g., a double disulfide-linked TMMP) comprises an amino acid sequence having at least 95%, at least 98%, at least 99%, or 100%, amino acid sequence identity to the following HLA-A*0101 (Y84C; A236C) amino acid sequence:

[0171] GSHSMRYFFTSVSRPGRGEPRFIAVGYVDDTQFVRFDSDAASQKMEPRAPWIEQE GPEYWDQETRNMKAHSQTDRANLGTLRGCYNQSEDGSHTIQIMYGCDVGPDGRFLRGYRQDA YDGKDYIALNEDLRSWTAADMAAQITKRKWEAVHAAEQRRVYLEGRCVDGLRRYLENGKET LQRTDPPKTHMTHHPISDHEATLRCWALGFYPAEITLTWQRDGEDQTQDTELVETRPCGDGTF QKWAAVVVPSGEEQRYTCHVQHEGLPKPLTLRWE (SEQ ID NO:145), where amino acid 84 is a Cys and amino acid 236 is a Cys.

### HLA-A*0201 (Y84C; A236C)

[0172] In some cases, the HLA-A heavy chain polypeptide present in a multiple disulfide-linked TMMP of the present disclosure (e.g., a double disulfide-linked TMMMP) comprises an amino acid sequence having at least 95%, at least 98%, at least 99%, or 100%, amino acid sequence identity to the following HLA-A*0201 (Y84C; A236C) amino acid sequence:

GSHSMRYFFTSVSRPGRGEPRFIAVGYVDDTQFVRFDSDAASQRMEPRAPWIEQEGPEYWDGET RKVKAHSQTHRVDLGTLRGCYNQSEAGSHTVQRMYGCDVGSDWRFLRGYHQYAYDGKDYIA LKEDLRSWTAADMAAQTTKHKWEAAHVAEQLRAYLEGTCVEWLRRYLENGKETLQRTDAPK THMTHHAVSDHEATLRCWALSFYPAEITLTWQRDGEDQTQDTELVETRPCGDGTFQKWAAVV VPSGQEQRYTCHVQHEGLPKPLTLRWEP (SEQ ID NO:146), where amino acid 84 is a Cys and amino acid 236 is a Cys.

### HLA-A*0202 (Y84C; A236C)

[0173] In some cases, the HLA-A heavy chain polypeptide present in a multiple disulfide-linked TMMP of the present disclosure (e.g., a double disulfide-linked TMMP) comprises an amino acid sequence having at least 95%, at least 98%, at least 99%, or 100%, amino acid sequence identity to the following HLA-A*0202 (Y84C; A236C) amino acid sequence:

GSHSMRYFFTSVSRPGRGEPRFIAVGYVDDTQFVRFDSDAASQRMEPRAPWIEQEGPEYWDGET RKVKAHSQTHRVDLGTLRGCYNQSEAGSHTVQRMYGCDVGSDWRFLRGYHQYAYDGKDYIA LKEDLRSWTAADMAAQTTKHKWEAAHVAEQLRAYLEGTCVEWLRRYLENGKETLQRTDAPK THMTHHAVSDHEATLRCWALSFYPAEITLTWQRDGEDQTQDTELVETRPCGDGTFQKWAAVV VPSGQEQRYTCHVQHEGLPKPLTLRWE (SEQ ID NO:147), where amino acid 84 is a Cys and amino acid 236 is a Cys.

### HLA-A*1101 (Y84C; A236C)

[0174] In some cases, the HLA-A heavy chain polypeptide present in a multiple disulfide-linked TMMP of the present disclosure (e.g., a double disulfide-linked TMMP) comprises an amino acid sequence having at least 95%, at least 98%, at least 99%, or 100%, amino acid sequence identity to the following HLA-A*1101 (Y84C; A236C) amino acid sequence:

GSHSMRYFYTSVSRPGRGEPRFIAVGYVDDTQFVRFDSDAASQRMEPRAPWIEQEGPEYWDQE TRNVKAQSQTDRVDLGTLRGCYNQSEDGSHTIQIMYGCDVGPDGRFLRGYRQDAYDGKDYIA LNEDLRSWTAADMAAQITKRKWEAAHAAEQQRAYLEGRCVEWLRRYLENGKETLQRTDPPK THMTHHPISDHEATLRCWALGFYPAEITLTWQRDGEDQTQDTELVETRPCGDGTFQKWAAVV VPSGEEQRYTCHVQHEGLPKPLTLRWE (SEQ ID NO:148), where amino acid 84 is a Cys and amino acid 236 is a Cys.

### HLA-A*2301 (Y84C; A236C)

[0175] In some cases, the HLA-A heavy chain polypeptide present in a multiple disulfide-linked TMMP of the present disclosure (e.g., a double disulfide-linked TMMP) comprises an amino acid sequence having at least 95%, at least 98%, at least 99%, or 100%, amino acid sequence identity to the following HLA-A*2301 (Y84C; A236C) amino acid sequence:

GSHSMRYFSTSVSRPGRGEPRFIAVGYVDDTQFVRFDSDAASQRMEPRAPWIEQEGPEYWDEET GKVKAHSQTDRENLRIALRCYNQSEAGSHTLQMMFGCDVGSDGRFLRGYHQYAYDGKDYIAL KEDLRSWTAADMAAQITQRKWEAARVAEQLRAYLEGTCVDGLRRYLENGKETLQRTDPPKTH MTHHPISDHEATLRCWALGFYPAEITLTWQRDGEDQTQDTELVETRPCGDGTFQKWAAVVVPS GEEQRYTCHVQHEGLPKPLTLRWE (SEQ ID NO:149), where amino acid 84 is a Cys and amino acid 236 is a Cys.

### HLA-A*2402 (Y84C; A236C)

[0176] In some cases, the HLA-A heavy chain polypeptide present in a multiple disulfide-linked TMMP of the present disclosure (e.g., a double disulfide-linked TMMP) comprises an amino acid sequence having at least 95%, at least 98%, at least 99%, or 100%, amino acid sequence identity to the following HLA-A*2402 (Y84C; A236C) amino acid sequence:

GSHSMRYFSTSVSRPGRGEPRFIAVGYVDDTQFVRFDSDAASQRMEPRAPWIEQEGPEYWDEET GKVKAHSQTDRENLRIALRCYNQSEAGSHTLQMMFGCDVGSDGRFLRGYHQYAYDGKDYIAL KEDLRSWTAADMAAQITKRKWEAAHVAEQQRAYLEGTCVDGLRRYLENGKETLQRTDPPKT HMTHHPISDHEATLRCWALGFYPAEITLTWQRDGEDQTQDTELVETRPCGDGTFQKWAAVVV PSGEEQRYTCHVQHEGLPKPLTLRWE (SEQ ID NO:150), where amino acid 84 is a Cys and amino acid 236 is a Cys.

### HLA-A*2407 (Y84C; A236C)

[0177] In some cases, the HLA-A heavy chain polypeptide present in a multiple disulfide-linked TMMP of the present disclosure (e.g., a double disulfide-linked TMMP) comprises an amino acid sequence having at least 95%, at least 98%, at least 99%, or 100%, amino acid sequence identity to the following HLA-A*2407 (Y84C; A236C) amino acid sequence:

GSHSMRYFSTSVSRPGRGEPRFIAVGYVDDTQFVRFDSDAASQRMEPRAPWIEQEGPEYWDEET GKVKAQSQTDRENLRIALRCYNQSEAGSHTLQMMFGCDVGSDGRFLRGYHQYAYDGKDYIAL KEDLRSWTAADMAAQITKRKWEAAHVAEQQRAYLEGTCVDGLRRYLENGKETLQRTDPPKT HMTHHPISDHEATLRCWALGFYPAEITLTWQRDGEDQTQDTELVETRPCGDGTFQKWAAVVV PSGEEQRYTCHVQHEGLPKPLTLRWE (SEQ ID NO:151), where amino acid 84 is a Cys and amino acid 236 is a Cys.

### HLA-A*3303 (Y84C; A236C)

[0178] In some cases, the HLA-A heavy chain polypeptide present in a multiple disulfide-linked TMMP of the present disclosure (e.g., a double disulfide-linked TMMP) comprises an amino acid sequence having at least 95%, at least 98%, at least 99%, or 100%, amino acid sequence identity to the following HLA-A*3303 (Y84C; A236C) amino acid sequence:

[0179] GSHSMRYFTTSVSRPGRGEPRFIAVGYVDDTQFVRFDSDAASQRMEPRAPWIEQE GPEYWDRNTRNVKAHSQIDRVDLGTLRGCYNQSEAGSHTIQMMYGCDVGSDGRFLRGYQQD AYDGKDYIALNEDLRSWTAADMAAQITQRKWEAARVAEQLRAYLEGTCVEWLRRYLENGKE TLQRTDPPKTHMTHHAVSDHEATLRCWALSFYPAEITLTWQRDGEDQTQDTELVETRPCGDGT FQKWASVVVPSGQEQRYTCHVQHEGLPKPLTLRWE (SEQ ID NO:152), where amino acid 84 is a Cys and amino acid 236 is a Cys.

### HLA-A*3401 (Y84C; A236C)

[0180] In some cases, the HLA-A heavy chain polypeptide present in a multiple disulfide-linked TMMP of the present disclosure (e.g., a double disulfide-linked TMMP) comprises an amino acid sequence having at least 95%, at least 98%, at least 99%, or 100%, amino acid sequence identity to the following HLA-A*3401 (Y84C; A236C) amino acid sequence:

GSHSMRYFYTSVSRPGRGEPRFIAVGYVDDTQFVRFDSDAASQRMEPRAPWIEQEGPEYWDRN TRKVKAQSQTDRVDLGTLRGCYNQSEDGSHTIQRMYGCDVGPDGRFLRGYQQDAYDGKDYIA LNEDLRSWTAADMAAQITQRKWETAHEAEQWRAYLEGTCVEWLRRYLENGKETLQRTDAPK THMTHHAVSDHEATLRCWALSFYPAEITLTWQRDGEDQTQDTELVETRPCGDGTFQKWASVV VPSGQEQRYTCHVQHEGLPKPLTLRWE (SEQ ID NO:153), where amino acid 84 is a Cys and amino acid 236 is a Cys.

### HLA-B

[0181] In some cases, a multiple disulfide-linked TMMP of the present disclosure (e.g., a double disulfide-linked TMMP) comprises: a) a first polypeptide comprising: i) peptide epitope; and ii) a first MHC polypeptide, where the first polypeptide comprises a peptide linker between the peptide epitope and the first MHC polypeptide, where the peptide linker comprises a Cys residue, and where the first MHC polypeptide is a β2M polypeptide that comprises an amino acid substitution that introduces a Cys residue; and b) a second polypeptide comprising an HLA-B MHC Class I heavy chain comprising an amino acid sequence having at least 60%, at least 70%, at least 80%, at least 90%, at least 95%, at least 98%, at least 99%, or 100%, amino acid sequence identity to the following amino acid sequence:

GSHSMRYFYTSVSRPGRGEPRFISVGYVDDTQFVRFDSDAASPREEPRAPWIEQEGPEYWDRNT QIYKAQAQTDRESLRNLRGCYNQSEAGSHTLQSMYGCDVGPDGRLLRGHDQYAYDGKDYIAL NEDLRSWTAADTAAQITQRKWEAAREAEQRRAYLEGECVEWLRRYLENGKDKLERADPPKTH VTHHPISDHEATLRCWALGFYPAEITLTWQRDGEDQTQDTELVETRPCGDRTFQKWAAVVVPS GEEQRYTCHVQHEGLPKPLTLRWEP (SEQ ID NO:154), where amino acid 84 is a Cys and amino acid 236 is a Cys; and c) at least one immunomodulatory polypeptide, where the first and/or the second polypeptide comprises the at least one immunomodulatory polypeptide. In some cases, the peptide linker comprises the amino acid sequence GCGGS (SEQ ID NO:139). In some cases, the peptide linker comprises the amino acid sequence GCGGS(GGGGS)n (SEQ ID NO:140), where n is an integer from 1 to 10. In some cases, the β2M polypeptide comprises an R12C substitution. For example, the β2M polypeptide can comprises an amino acid sequence having at least 90%, at least 95%, at least 98%, at least 99%, or 100%, amino acid sequence identity to the following amino acid sequence:
IQRTPKIQVYSCHPAENGKSNFLNCYVSGFHPSDIEVDLLKNGERIEKVEHSDLSFSKDWSFYLL YYTEFTPTEKDEYACRVNHVTLSQPKIVKWDRDM (SEQ ID NO:155), where amino acid 12 is a Cys. The at least one immunomodulatory polypeptide can be a cytokine, a 4-1BBL polypeptide, a B7-1 polypeptide; a B7-2 polypeptide, an ICOS-L polypeptide, an OX-40L polypeptide, a CD80 polypeptide, a CD86 polypeptide, a PD-L1 polypeptide, a FasL polypeptide, or a PD-L2 polypeptide. In some cases, the at least one immunomodulatory polypeptide is a reduced affinity variant, as described elsewhere herein. As noted above, the TMMP also includes: i) an Ig Fe polypeptide or a non-Ig scaffold; and ii) a TTP.

[0182] In some cases, a multiple disulfide-linked TMMP of the present disclosure comprises an HLA-B Class I heavy chain polypeptide. In some cases, the HLA-B heavy chain polypeptide present in a multiple disulfide-linked TMMP of the present disclosure (e.g., a double disulfide-linked TMMP) comprises an amino acid sequence having at least 95%, at least 98%, or at least 99%, amino acid sequence identity to the HLA-B*0702, HLA-B*0801, HLA-B*1502, HLA-B*3802, HLA-B*4001, HLA-B*4601, or HLA-B*5301 amino acid sequence depicted in FIG. 8A, where the HLA-B heavy chain polypeptide comprises Y84C and A236C substitutions.

### HLA-B*0702 (Y84C; A236C)

[0183] In some cases, the HLA-B heavy chain polypeptide present in a multiple disulfide-linked TMMP of the present disclosure (e.g., a double disulfide-linked TMMP) comprises an amino acid sequence having at least 95%, at least 98%, at least 99%, or 100%, amino acid sequence identity to the following HLA-B*0702 (Y84C; A236C) amino acid sequence:

[0184] GSHSMRYFYTSVSRPGRGEPRFISVGYVDDTQFVRFDSDAASPREEPRAPWIEQE GPEYWDRNTQIYKAQAQTDRESLRNLRGCYNQSEAGSHTLQSMYGCDVGPDGRLLRGHDQYA YDGKDYIALNEDLRSWTAADTAAQITQRKWEAAREAEQRRAYLEGECVEWLRRYLENGKDKL ERADPPKTHVTHHPISDHEATLRCWALGFYPAEITLTWQRDGEDQTQDTELVETRPCGDRTFQK WAAVVVPSGEEQRYTCHVQHEGLPKPLTLRWE (SEQ ID NO:156), where amino acid 84 is a Cys and amino acid 236 is a Cys.

### HLA-B*0801 (Y84C; A236C)

[0185] In some cases, the HLA-B heavy chain polypeptide present in a multiple disulfide-linked TMMP of the present disclosure (e.g., a double disulfide-linked TMMP) comprises an amino acid sequence having at least 95%, at least 98%, at least 99%, or 100%, amino acid sequence identity to the following HLA-B*0801 (Y84C; A236C) amino acid sequence:

[0186] GSHSMRYFDTAMSRPGRGEPRFISVGYVDDTQFVRFDSDAASPREEPRAPWIEQE GPEYWDRNTQIFKTNTQTDRESLRNLRGCYNQSEAGSHTLQSMYGCDVGPDGRLLRGHNQYA YDGKDYIALNEDLRSWTAADTAAQITQRKWEAARVAEQDRAYLEGTCVEWLRRYLENGKDTL ERADPPKTHVTHHPISDHEATLRCWALGFYPAEITLTWQRDGEDQTQDTELVETRPCGDRTFQK WAAVVVPSGEEQRYTCHVQHEGLPKPLTLRWE (SEQ ID NO:157), where amino acid 84 is a Cys and amino acid 236 is a Cys.

### HLA-B*1502 (Y84C; A236C)

[0187] In some cases, the HLA-B heavy chain polypeptide present in a multiple disulfide-linked TMMP of the present disclosure (e.g., a double disulfide-linked TMMP) comprises an amino acid sequence having at least 95%, at least 98%, at least 99%, or 100%, amino acid sequence identity to the following HLA-B*1502 (Y84C; A236C) amino acid sequence:

[0188] GSHSMRYFYTAMSRPGRGEPRFIAVGYVDDTQFVRFDSDAASPRMAPRAPWIEQ EGPEYWDRNTQISKTNTQTYRESLRNLRGCYNQSEAGSHIIQRMYGCDVGPDGRLLRGYDQSA YDGKDYIALNEDLSSWTAADTAAQITQRKWEAAREAEQLRAYLEGLCVEWLRRYLENGKETL QRADPPKTHVTHHPISDHEATLRCWALGFYPAEITLTWQRDGEDQTQDTELVETRPCGDRTFQ KWAAVVVPSGEEQRYTCHVQHEGLPKPLTLRWE (SEQ ID NO:158), where amino acid 84 is a Cys and amino acid 236 is a Cys.

### HLA-B*3802 (Y84C; A236C)

[0189] In some cases, the HLA-B heavy chain polypeptide present in a multiple disulfide-linked TMMP of the present disclosure (e.g., a double disulfide-linked TMMP) comprises an amino acid sequence having at least 95%, at least 98%, at least 99%, or 100%, amino acid sequence identity to the following HLA-B*3802 (Y84C; A236C) amino acid sequence:

[0190] GSHSMRYFYTSVSRPGRGEPRFISVGYVDDTQFVRFDSDAASPREEPRAPWIEQE GPEYWDRNTQICKTNTQTYRENLRTALRCYNQSEAGSHTLQRMYGCDVGPDGRLLRGHNQFA YDGKDYIALNEDLSSWTAADTAAQITQRKWEAARVAEQLRTYLEGTCVEWLRRYLENGKETL QRADPPKTHVTHHPISDHEATLRCWALGFYPAEITLTWQRDGEDQTQDTELVETRPCGDRTFQ KWAAVVVPSGEEQRYTCHVQHEGLPKPLTLRWE (SEQ ID NO:159), where amino acid 84 is a Cys and amino acid 236 is a Cys.

### HLA-B*4001 (Y84C; A2346C)

[0191] In some cases, the HLA-B heavy chain polypeptide present in a multiple disulfide-linked TMMP of the present disclosure (e.g., a double disulfide-linked TMMP) comprises an amino acid sequence having at least 95%, at least 98%, at least 99%, or 100%, amino acid sequence identity to the following HLA-B*4001 (Y84C; A236C) amino acid sequence:

[0192] GSHSMRYFHTAMSRPGRGEPRFITVGYVDDTLFVRFDSDATSPRKEPRAPWIEQE GPEYWDRETQISKTNTQTYRESLRNLRGCYNQSEAGSHTLQRMYGCDVGPDGRLLRGHNQYA YDGKDYIALNEDLRSWTAADTAAQISQRKLEAARVAEQLRAYLEGECVEWLRRYLENGKDKL ERADPPKTHVTHHPISDHEATLRCWALGFYPAEITLTWQRDGEDQTQDTELVETRPCGDRTFQK WAAVVVPSGEEQRYTCHVQHEGLPKPLTLRWE (SEQ ID NO:160) where amino acid 84 is a Cys and amino acid 236 is a Cys.

### HLA-B*4601 (Y84C; A236C)

[0193] In some cases, the HLA-B heavy chain polypeptide present in a multiple disulfide-linked TMMP of the present disclosure (e.g., a double disulfide-linked TMMP) comprises an amino acid sequence having at least 95%, at least 98%, at least 99%, or 100%, amino acid sequence identity to the following HLA-B*4601 (Y84C; A236C) amino acid sequence:

[0194] GSHSMRYFYTAMSRPGRGEPRFIAVGYVDDTQFVRFDSDAASPRMAPRAPWIEQ EGPEYWDRETQKYKRQAQTDRVSLRNLRGCYNQSEAGSHTLQRMYGCDVGPDGRLLRGHDQ SAYDGKDYIALNEDLSSWTAADTAAQITQRKWEAAREAEQWRAYLEGLCVEWLRRYLENGKE TLQRADPPKTHVTHHPISDHEATLRCWALGFYPAEITLTWQRDGEDQTQDTELVETRPCGDRTF QKWAAVVVPSGEEQRYTCHVQHEGLPKPLTLRWE (SEQ ID NO:161) where amino acid 84 is a Cys and amino acid 236 is a Cys.

### HLA-B*5301 (Y84C; A236C)

[0195] In some cases, the HLA-B heavy chain polypeptide present in a multiple disulfide-linked TMMP of the present disclosure (e.g., a double disulfide-linked TMMP) comprises an amino acid sequence having at least 95%, at least 98%, at least 99%, or 100%, amino acid sequence identity to the following HLA-B*5301 (Y84C; A236C) amino acid sequence:

[0196] GSHSMRYFYTAMSRPGRGEPRFIAVGYVDDTQFVRFDSDAASPRTEPRAPWIEQE GPEYWDRNTQIFKTNTQTYRENLRIALRCYNQSEAGSHIIQRMYGCDLGPDGRLLRGHDQSAY DGKDYIALNEDLSSWTAADTAAQITQRKWEAARVAEQLRAYLEGLCVEWLRRYLENGKETLQ RADPPKTHVTHHPVSDHEATLRCWALGFYPAEITLTWQRDGEDQTQDTELVETRPCGDRTFQK WAAVVVPSGEEQRYTCHVQHEGLPKPLTLRWE (SEQ ID NO:162) where amino acid 84 is a Cys and amino acid 236 is a Cys.

### HLA-C

[0197] In some cases, a multiple disulfide-linked TMMP of the present disclosure (e.g., a double disulfide-linked TMMP) comprises: a) a first polypeptide comprising: i) a peptide epitope; and ii) a first MHC polypeptide, where the first polypeptide comprises a peptide linker between the peptide and the first MHC polypeptide, where the peptide linker comprises a Cys residue, and where the first MHC polypeptide is a β2M polypeptide that comprises an amino acid substitution that introduces a Cys residue; and b) a second polypeptide comprising an HLA-C MHC Class I heavy chain comprising an amino acid sequence having at least 60%, at least 70%, at least 80%, at least 90%, at least 95%, at least 98%, at least 99%, or 100%, amino acid sequence identity to the following amino acid sequence:

CSHSMRYFDTAVSRPGRGEPRFISVGYVDDTQFVRFDSDAASPRGEPRAPWVEQEGPEYWDRE TQNYKRQAQADRVSLRNLRGCYNQSEDGSHTLQRMYGCDLGPDGRLLRGYDQSAYDGKDYI ALNEDLRSWTAADTAAQITQRKLEAARAAEQLRAYLEGTCVEWLRRYLENGKETLQRAEPPKT HVTHHPLSDHEATLRCWALGFYPAEITLTWQRDGEDQTQDTELVETRPCGDGTFQKWAAVVV PSGQEQRYTCHMQHEGLQEPLTLSWEP (SEQ ID NO:163), where amino acid 84 is a Cys and amino acid 236 is a Cys; and c) at least one immunomodulatory polypeptide, where the first and/or the second polypeptide comprises the at least one immunomodulatory polypeptide. In some cases, the peptide linker comprises the amino acid sequence GCGGS (SEQ ID NO:139). In some cases, the peptide linker comprises the amino acid sequence GCGGS(GGGGS)n (SEQ ID NO: 140), where n is an integer from 1 to 10. In some cases, the β2M polypeptide comprises an R12C substitution. For example, the β2M polypeptide can comprises an amino acid sequence having at least 90%, at least 95%, at least 98%, at least 99%, or 100%, amino acid sequence identity to the following amino acid sequence:
IQRTPKIQVYSCHPAENGKSNFLNCYVSGFHPSDIEVDLLKNGERIEKVEHSDLSFSKDWSFYLL YYTEFTPTEKDEYACRVNHVTLSQPKIVKWDRDM (SEQ ID NO:164), where amino acid 12 is a Cys. The at least one immunomodulatory polypeptide can be a cytokine, a 4-1BBL polypeptide, a B7-1 polypeptide; a B7-2 polypeptide, an ICOS-L polypeptide, an OX-40L polypeptide, a CD80 polypeptide, a CD86 polypeptide, a PD-L1 polypeptide, a FasL polypeptide, or a PD-L2 polypeptide. In some cases, the at least one immunomodulatory polypeptide is a reduced affinity variant, as described elsewhere herein. As noted above, the TMMP also includes: i) an Ig Fc polypeptide or a non-Ig scaffold; and ii) a TTP.

[0198] In some cases, a multiple disulfide-linked TMMP of the present disclosure (e.g., a double disulfide-linked TMMP) comprises an HLA-C Class I heavy chain polypeptide. In some cases, the HLA-C heavy chain polypeptide present in a multiple disulfide-linked TMMP of the present disclosure (e.g., a double disulfide-linked TMMP) comprises an amino acid sequence having at least 95%, at least 98%, or at least 99%, amino acid sequence identity to the HLA-C*0102, HLA-C*0303, HLA-C*0304, HLA-C*0401, HLA-C*0602, HLA-C*0701, HLA-C*0702, HLA-C*0801, or HLA-C*1502 amino acid sequence depicted in FIG. 9A, where the HLA-C heavy chain polypeptide comprises Y84C and A236C substitutions.

### HLA-C*01:02 (Y84C; A236C)

[0199] In some cases, the HLA-C heavy chain polypeptide present in a multiple disulfide-linked TMMP of the present disclosure (e.g., a double disulfide-linked TMMP) comprises an amino acid sequence having at least 95%, at least 98%, at least 99%, or 100%, amino acid sequence identity to the following HLA-C*01:02 (Y84C; A236C) amino acid sequence:

[0200] CSHSMKYFFTSVSRPGRGEPRFISVGYVDDTQFVRFDSDAASPRGEPRAPWVEQE GPEYWDRETQKYKRQAQTDRVSLRNLRGCYNQSEAGSHTLQWMCGCDLGPDGRLLRGYDQY AYDGKDYIALNEDLRSWTAADTAAQITQRKWEAAREAEQRRAYLEGTCVEWLRRYLENGKET LQRAEHPKTHVTHHPVSDHEATLRCWALGFYPAEITLTWQWDGEDQTQDTELVETRPCGDGTF QKWAAVMVPSGEEQRYTCHVQHEGLPEPLTLRWEP (SEQ ID NO:165), where amino acid 84 is a Cys and amino acid 236 is a Cys.

### HLA-C*0303 (Y84C; A236C)

[0201] In some cases, the HLA-C heavy chain polypeptide present in a multiple disulfide-linked TMMP of the present disclosure (e.g., a double disulfide-linked TMMP) comprises an amino acid sequence having at least 95%, at least 98%, at least 99%, or 100%, amino acid sequence identity to the following HLA-C*03:03 (Y84C; A236C) amino acid sequence:

[0202] GSHSMRYFYTAVSRPGRGEPHFIAVGYVDDTQFVRFDSDAASPRGEPRAPWVEQ EGPEYWDRETQKYKRQAQTDRVSLRNLRGCYNQSEARSHIIQRMYGCDVGPDGRLLRGYDQY AYDGKDYIALNEDLRSWTAADTAAQITQRKWEAAREAEQLRAYLEGLCVEWLRRYLKNGKET LQRAEHPKTHVTHHPVSDHEATLRCWALGFYPAEITLTWQWDGEDQTQDTELVETRPCGDGTF QKWAAVVVPSGEEQRYTCHVQHEGLPEPLTLRWEP (SEQ ID NO:166), where amino acid 84 is a Cys and amino acid 236 is a Cys.

### HLA-C*0304 (Y84C; A236C)

[0203] In some cases, the HLA-C heavy chain polypeptide present in a multiple disulfide-linked TMMP of the present disclosure (e.g., a double disulfide-linked TMMP) comprises an amino acid sequence having at least 95%, at least 98%, at least 99%, or 100%, amino acid sequence identity to the following HLA-C*03:04 (Y84C; A236C) amino acid sequence:

[0204] GSHSMRYFYTAVSRPGRGEPHFIAVGYVDDTQFVRFDSDAASPRGEPRAPWVEQ EGPEYWDRETQKYKRQAQTDRVSLRNLRGCYNQSEAGSHIIQRMYGCDVGPDGRLLRGYDQY AYDGKDYIALNEDLRSWTAADTAAQITQRKWEAAREAEQLRAYLEGLCVEWLRRYLKNGKET LQRAEHPKTHVTHHPVSDHEATLRCWALGFYPAEITLTWQWDGEDQTQDTELVETRPCGDGTF QKWAAVVVPSGEEQRYTCHVQHEGLPEPLTLRWEP (SEQ ID NO:167), where amino acid 84 is a Cys and amino acid 236 is a Cys.

### HLA-C*0401 (Y84C; A236C)

[0205] In some cases, the HLA-C heavy chain polypeptide present in a multiple disulfide-linked TMMP of the present disclosure (e.g., a double disulfide-linked TMMP) comprises an amino acid sequence having at least 95%, at least 98%, at least 99%, or 100%, amino acid sequence identity to the following HLA-C*04:01 (Y84C; A236C) amino acid sequence:

[0206] GSHSMRYFSTSVSWPGRGEPRFIAVGYVDDTQFVRFDSDAASPRGEPREPWVEQ EGPEYWDRETQKYKRQAQADRVNLRKLRGCYNQSEDGSHTLQRMFGCDLGPDGRLLRGYNQ FAYDGKDYIALNEDLRSWTAADTAAQITQRKWEAAREAEQRRAYLEGTCVEWLRRYLENGKE TLQRAEHPKTHVTHHPVSDHEATLRCWALGFYPAEITLTWQWDGEDQTQDTELVETRPCGDGT FQKWAAVVVPSGEEQRYTCHVQHEGLPEPLTLRWKP (SEQ ID NO:168), where amino acid 84 is a Cys and amino acid 236 is a Cys.

### HLA-C*0602 (Y84C; A236C)

[0207] In some cases, the HLA-C heavy chain polypeptide present in a multiple disulfide-linked TMMP of the present disclosure (e.g., a double disulfide-linked TMMP) comprises an amino acid sequence having at least 95%, at least 98%, at least 99%, or 100%, amino acid sequence identity to the following HLA-C*06:02 (Y84C; A236C) amino acid sequence:

[0208] CSHSMRYFDTAVSRPGRGEPRFISVGYVDDTQFVRFDSDAASPRGEPRAPWVEQ EGPEYWDRETQKYKRQAQADRVNLRKLRGCYNQSEDGSHTLQWMYGCDLGPDGRLLRGYD QSAYDGKDYIALNEDLRSWTAADTAAQITQRKWEAAREAEQWRAYLEGTCVEWLRRYLENG KETLQRAEHPKTHVTHHPVSDHEATLRCWALGFYPAEITLTWQRDGEDQTQDTELVETRPCGD GTFQKWAAVVVPSGEEQRYTCHVQHEGLPEPLTLRWEP (SEQ ID NO:169), where amino acid 84 is a Cys and amino acid 236 is a Cys.

### HLA-C*0701 (Y84C; A236C)

[0209] In some cases, the HLA-C heavy chain polypeptide present in a multiple disulfide-linked TMMP of the present disclosure (e.g., a double disulfide-linked TMMP) comprises an amino acid sequence having at least 95%, at least 98%, at least 99%, or 100%, amino acid sequence identity to the following HLA-C*07:01 (Y84C; A236C) amino acid sequence:

[0210] CSHSMRYFDTAVSRPGRGEPRFISVGYVDDTQFVRFDSDAASPRGEPRAPWVEQ EGPEYWDRETQNYKRQAQADRVSLRNLRGCYNQSEDGSHTLQRMYGCDLGPDGRLLRGYDQ SAYDGKDYIALNEDLRSWTAADTAAQITQRKLEAARAAEQLRAYLEGTCVEWLRRYLENGKE TLQRAEPPKTHVTHHPLSDHEATLRCWALGFYPAEITLTWQRDGEDQTQDTELVETRPCGDGT FQKWAAVVVPSGQEQRYTCHMQHEGLQEPLTLSWEP (SEQ ID NO:170), where amino acid 84 is a Cys and amino acid 236 is a Cys.

### HLA-C*0702 (Y84C; A236C)

[0211] In some cases, the HLA-C heavy chain polypeptide present in a multiple disulfide-linked TMMP of the present disclosure (e.g., a double disulfide-linked TMMP) comprises an amino acid sequence having at least 95%, at least 98%, at least 99%, or 100%, amino acid sequence identity to the following HLA-C*07:02 (Y84C; A236C) amino acid sequence:

[0212] CSHSMRYFDTAVSRPGRGEPRFISVGYVDDTQFVRFDSDAASPRGEPRAPWVEQ EGPEYWDRETQKYKRQAQADRVSLRNLRGCYNQSEDGSHTLQRMSGCDLGPDGRLLRGYDQS AYDGKDYIALNEDLRSWTAADTAAQITQRKLEAARAAEQLRAYLEGTCVEWLRRYLENGKET LQRAEPPKTHVTHHPLSDHEATLRCWALGFYPAEITLTWQRDGEDQTQDTELVETRPCGDGTF QKWAAVVVPSGQEQRYTCHMQHEGLQEPLTLSWEP (SEQ ID NO:171), where amino acid 84 is a Cys and amino acid 236 is a Cys.

### HLA-C*0801 (Y84C; A236C)

[0213] In some cases, the HLA-C heavy chain polypeptide present in a multiple disulfide-linked TMMP of the present disclosure (e.g., a double disulfide-linked TMMP) comprises an amino acid sequence having at least 95%, at least 98%, at least 99%, or 100%, amino acid sequence identity to the following HLA-C*08:01 (Y84C; A236C) amino acid sequence:

[0214] CSHSMRYFYTAVSRPGRGEPRFIAVGYVDDTQFVQFDSDAASPRGEPRAPWVEQ EGPEYWDRETQKYKRQAQTDRVSLRNLRGCYNQSEAGSHTLQRMYGCDLGPDGRLLRGYNQ FAYDGKDYIALNEDLRSWTAADTAAQITQRKWEAARTAEQLRAYLEGTCVEWLRRYLENGKK TLQRAEHPKTHVTHHPVSDHEATLRCWALGFYPAEITLTWQRDGEDQTQDTELVETRPCGDGT FQKWAAVVVPSGEEQRYTCHVQHEGLPEPLTLRWGP (SEQ ID NO:172), where amino acid 84 is a Cys and amino acid 236 is a Cys.

### HLA-C*1502 (Y84C; A236C)

[0215] In some cases, the HLA-C heavy chain polypeptide present in a multiple disulfide-linked TMMP of the present disclosure (e.g., a double disulfide-linked TMMP) comprises an amino acid sequence having at least 95%, at least 98%, at least 99%, or 100%, amino acid sequence identity to the following HLA-C*15:02 (Y84C; A236C) amino acid sequence:

[0216] CSHSMRYFYTAVSRPGRGEPHFIAVGYVDDTQFVRFDSDAASPRGEPRAPWVEQ EGPEYWDRETQNYKRQAQTDRVNLRKLRGCYNQSEAGSHIIQRMYGCDLGPDGRLLRGHDQL AYDGKDYIALNEDLRSWTAADTAAQITQRKWEAAREAEQLRAYLEGTCVEWLRRYLENGKET LQRAEHPKTHVTHHPVSDHEATLRCWALGFYPAEITLTWQRDGEDQTQDTELVETRPCGDGTF QKWAAVVVPSGEEQRYTCHVQHEGLPEPLTLRWEP (SEQ ID NO:173), where amino acid 84 is a Cys and amino acid 236 is a Cys.

### Scaffold Polypeptides

[0217] A TMMP of the present disclosure comprises an Fc polypeptide or a non-antibody scaffold polypeptide.

[0218] Suitable scaffold polypeptides include antibody-based scaffold polypeptides and non-antibody-based scaffolds. Non-antibody-based scaffolds include, e.g., albumin, an XTEN (extended recombinant) polypeptide, transferrin, an Fc receptor polypeptide, an elastin-like polypeptide (see, e.g., Hassouneh et al. (2012) Methods Enzymol. 502:215; e.g., a polypeptide comprising a pentapeptide repeat unit of (Val-Pro-Gly-X-Gly; SEQ ID NO:174), where X is any amino acid other than proline), an albumin-binding polypeptide, a silk-like polypeptide (see, e.g., Valluzzi et al. (2002) Philos Trans R Soc Lond B Biol Sci. 357:165), a silk-elastin-like polypeptide (SELP; see, e.g., Megeed et al. (2002) Adv Drug Deliv Rev. 54:1075), and the like. Suitable XTEN polypeptides include, e.g., those disclosed in WO 2009/023270, WO 2010/091122, WO 2007/103515, US 2010/0189682, and US 2009/0092582; see also Schellenberger et al. (2009) Nat Biotechnol. 27:1186). Suitable albumin polypeptides include, e.g., human serum albumin.

[0219] Suitable scaffold polypeptides will in some cases be a half-life extending polypeptides. Thus, in some cases, a suitable scaffold polypeptide increases the in vivo half-life (e.g., the serum half-life) of the TMMP, compared to a control TMMP lacking the scaffold polypeptide. For example, in some cases, a scaffold polypeptide increases the in vivo half-life (e.g., the serum half-life) of the TMMP, compared to a control TMMP lacking the scaffold polypeptide, by at least about 10%, at least about 15%, at least about 20%, at least about 25%, at least about 50%, at least about 2-fold, at least about 2.5-fold, at least about 5-fold, at least about 10-fold, at least about 25-fold, at least about 50-fold, at least about 100-fold, or more than 100-fold. As an example, in some cases, an Fc polypeptide increases the in vivo half-life (e.g., the serum half-life) of the TMMP, compared to a control TMMP lacking the Fc polypeptide, by at least about 10%, at least about 15%, at least about 20%, at least about 25%, at least about 50%, at least about 2-fold, at least about 2.5-fold, at least about 5-fold, at least about 10-fold, at least about 25-fold, at least about 50-fold, at least about 100-fold, or more than 100-fold.

### Fc Polypeptides

[0220] In some cases, the first and/or the second polypeptide chain of a TMMP of the present disclosure comprises an Fc polypeptide. The Fc polypeptide of a TMMP of the present disclosure can be a human IgG1 Fc, a human IgG2 Fc, a human IgG3 Fc, a human IgG4 Fc, etc. In some cases, the Fc polypeptide comprises an amino acid sequence having at least about 70%, at least about 75%, at least about 80%, at least about 85%, at least about 90%, at least about 95%, at least about 98%, at least about 99%, or 100%, amino acid sequence identity to an amino acid sequence of an Fc region depicted in FIG. 3A-3G. In some cases, the Fc region comprises an amino acid sequence having at least about 70%, at least about 75%, at least about 80%, at least about 85%, at least about 90%, at least about 95%, at least about 98%, at least about 99%, or 100%, amino acid sequence identity to the human IgG1 Fc polypeptide depicted in FIG. 3A. In some cases, the Fc region comprises an amino acid sequence having at least about 70%, at least about 75%, at least about 80%, at least about 85%, at least about 90%, at least about 95%, at least about 98%, at least about 99%, or 100%, amino acid sequence identity to the human IgG1 Fc polypeptide depicted in FIG. 3A; and comprises a substitution of N77; e.g., the Fc polypeptide comprises an N77A substitution. In some cases, the Fc polypeptide comprises an amino acid sequence having at least about 70%, at least about 75%, at least about 80%, at least about 85%, at least about 90%, at least about 95%, at least about 98%, at least about 99%, or 100%, amino acid sequence identity to the human IgG2 Fc polypeptide depicted in FIG. 3A; e.g., the Fc polypeptide comprises an amino acid sequence having at least about 70%, at least about 75%, at least about 80%, at least about 85%, at least about 90%, at least about 95%, at least about 98%, at least about 99%, or 100%, amino acid sequence identity to amino acids 99-325 of the human IgG2 Fc polypeptide depicted in FIG. 3A. In some cases, the Fc polypeptide comprises an amino acid sequence having at least about 70%, at least about 75%, at least about 80%, at least about 85%, at least about 90%, at least about 95%, at least about 98%, at least about 99%, or 100%, amino acid sequence identity to the human IgG3 Fc polypeptide depicted in FIG. 3A; e.g., the Fc polypeptide comprises an amino acid sequence having at least about 70%, at least about 75%, at least about 80%, at least about 85%, at least about 90%, at least about 95%, at least about 98%, at least about 99%, or 100%, amino acid sequence identity to amino acids 19-246 of the human IgG3 Fc polypeptide depicted in FIG. 3A. In some cases, the Fc polypeptide comprises an amino acid sequence having at least about 70%, at least about 75%, at least about 80%, at least about 85%, at least about 90%, at least about 95%, at least about 98%, at least about 99%, or 100%, amino acid sequence identity to the human IgM Fc polypeptide depicted in FIG. 3B; e.g., the Fc polypeptide comprises an amino acid sequence having at least about 70%, at least about 75%, at least about 80%, at least about 85%, at least about 90%, at least about 95%, at least about 98%, at least about 99%, or 100%, amino acid sequence identity to amino acids 1-276 to the human IgM Fc polypeptide depicted in FIG. 3B. In some cases, the Fc polypeptide comprises an amino acid sequence having at least about 70%, at least about 75%, at least about 80%, at least about 85%, at least about 90%, at least about 95%, at least about 98%, at least about 99%, or 100%, amino acid sequence identity to the human IgA Fc polypeptide depicted in FIG. 3C; e.g., the Fc polypeptide comprises an amino acid sequence having at least about 70%, at least about 75%, at least about 80%, at least about 85%, at least about 90%, at least about 95%, at least about 98%, at least about 99%, or 100%, amino acid sequence identity to amino acids 1-234 to the human IgA Fc polypeptide depicted in FIG. 3C.

[0221] In some cases, the Fc polypeptide comprises an amino acid sequence having at least about 70%, at least about 75%, at least about 80%, at least about 85%, at least about 90%, at least about 95%, at least about 98%, at least about 99%, or 100%, amino acid sequence identity to the human IgG4 Fc polypeptide depicted in FIG. 3C. In some cases, the Fc polypeptide comprises an amino acid sequence having at least about 70%, at least about 75%, at least about 80%, at least about 85%, at least about 90%, at least about 95%, at least about 98%, at least about 99%, or 100%, amino acid sequence identity to amino acids 100 to 327 of the human IgG4 Fc polypeptide depicted in FIG. 3C.

[0222] In some cases, the IgG4 Fc polypeptide comprises the following amino acid sequence:

(SEQ ID NO: 175)
PPCPSCPAPEFLGGPSVFLFPPKPKDTLMISRTPEVTCVVVDVSQEDPEV
QFNWYVDGVEVHNAKTKPREEQFNSTYRVVSVLTVLHQDWLNGKEYKCKV
SNKGLPSSIEKTISKAKGQPREPQVYTLPPSQEEMTKNQVSLTCLVKGFY
PSDIAVEWESNGQPENNYKTTPPVLDSDGSFFLYSRLTVDKSRWQEGNVF
SCSVMHEALHNHYTQKSLSLSPG.

[0223] In some cases, the Fc polypeptide present in a TMMP comprises the amino acid sequence depicted in FIG. 3A (human IgG1 Fc). In some cases, the Fc polypeptide present in a TMMP comprises the amino acid sequence depicted in FIG. 3A (human IgG1 Fc), except for a substitution of N297 (N77 of the amino acid sequence depicted in FIG. 3A) with an amino acid other than asparagine. In some cases, the Fc polypeptide present in a TMMP comprises the amino acid sequence depicted in FIG. 3C (human IgG1 Fc comprising an N297A substitution, which is N77 of the amino acid sequence depicted in FIG. 3A). In some cases, the Fc polypeptide present in a TMMP comprises the amino acid sequence depicted in FIG. 3A (human IgG1 Fc), except for a substitution of L234 (L14 of the amino acid sequence depicted in FIG. 3A) with an amino acid other than leucine. In some cases, the Fc polypeptide present in a TMMP comprises the amino acid sequence depicted in FIG. 3A (human IgG1 Fc), except for a substitution of L235 (L15 of the amino acid sequence depicted in FIG. 3A) with an amino acid other than leucine.

[0224] In some cases, the Fc polypeptide present in a TMMP comprises the amino acid sequence depicted in FIG. 3E. In some cases, the Fc polypeptide present in a TMMP comprises the amino acid sequence depicted in FIG. 3F. In some cases, the Fc polypeptide present in a TMMP comprises the amino acid sequence depicted in FIG. 5G (human IgG1 Fc comprising an L234A substitution and an L235A substitution, corresponding to positions 14 and 15 of the amino acid sequence depicted in FIG. 3G). In some cases, the Fc polypeptide present in a TMMP comprises the amino acid sequence depicted in FIG. 3A (human IgG1 Fc), except for a substitution of P331 (P111 of the amino acid sequence depicted in FIG. 3A) with an amino acid other than proline; in some cases, the substitution is a P331S substitution. In some cases, the Fc polypeptide present in a TMMP comprises the amino acid sequence depicted in FIG. 3A (human IgG1 Fc), except for substitutions at L234 and L235 (L14 and L15 of the amino acid sequence depicted in FIG. 3A) with amino acids other than leucine. In some cases, the Fc polypeptide present in a TMMP comprises the amino acid sequence depicted in FIG. 3A (human IgG1 Fc), except for substitutions at L234 and L235 (L14 and L15 of the amino acid sequence depicted in FIG. 3A) with amino acids other than leucine, and a substitution of P331 (P111 of the amino acid sequence depicted in FIG. 3A) with an amino acid other than proline. In some cases, the Fc polypeptide present in a TMMP comprises the amino acid sequence depicted in FIG. 3E (human IgG1 Fc comprising L234F, L235E, and P331S substitutions (corresponding to amino acid positions 14, 15, and 111 of the amino acid sequence depicted in FIG. 3E). In some cases, the Fc polypeptide present in a TMMP is an IgG1 Fc polypeptide that comprises L234A and L235A substitutions (substitutions of L14 and L15 of the amino acid sequence depicted in FIG. 3A with Ala), as depicted in FIG. 3G.

[0225] Ig Fc heavy chain CH2 and CH3 domains, such as those shown in FIGS. 3A to 3G, may also function as dimerization or multimerization sequences (e.g., where a TMMP comprises two or more heterodimers). Where an asymmetric pairing between two Ig Fc polypeptides is desired, the Ig Fc polypeptides may incorporate knob-in-hole modifications in, for example the CH3 domain. One such knob-in-hole pair comprises a T366Y and Y407T mutant pair in the CH3 domain interface of IgG1, or the corresponding residues of another Ig Fc (where “T366” corresponds to amino acid 146 of the IgG1 Fc amino acid sequence depicted in FIG. 3A; and “Y407” corresponds to amino acid 187 of the IgG1 Fc amino acid sequence depicted in FIG. 3A). See Ridgway et al., Protein Engineering 9:7, 617-621 (1996), (substitutions are denoted by EU numbering scheme of Kabat et al. (1991)). Another knob-into-hole pairing involves the formation of a knob by a T366W substitution, and a hole by the triple substitutions T366S, L368A and Y407V on the complementary Fc polypeptide (where “T366” corresponds to amino acid 146 of the IgG1 Fc amino acid sequence depicted in FIG. 3A; “L368” corresponds to amino acid 148 of the IgG1 Fc amino acid sequence depicted in FIG. 3A; and “Y407” corresponds to amino acid 187 of the IgG1 Fc amino acid sequence depicted in FIG. 3A). See Xu et al. mAbs 7:1, 231-242 (2015). For example, in some cases, a first TMMP heterodimer can comprise an IgG1 Fc polypeptide comprising a T366Y substitution (e.g., a T146Y substitution based on the IgG1 Fc amino acid sequence depicted in FIG. 3A); and a second TMMP heterodimer can comprise an IgG1 Fc polypeptide comprising a Y407T substitution (e.g., a Y187T substitution based on the IgG1 Fc amino acid sequence depicted in FIG. 3A). As another example, in some cases, a first TMMP heterodimer can comprise an IgG1 Fc polypeptide comprising a T366W substitution (e.g., a T146W substitution based on the IgG1 Fc amino acid sequence depicted in FIG. 3A); and a second TMMP heterodimer can comprise an IgG1 Fc polypeptide comprising a T366S substitution, an L368A substitution, and a Y407V substitution (e.g., a T146S substitution, an L148A substitution, and a Y187V substitution based on the IgG1 Fc amino acid sequence depicted in FIG. 3A). Fc polypeptides, either with or without knob-into-hole modifications, can be stabilized by the formation of disulfide bonds between the Fc polypeptides (e.g., the hinge region disulfide bonds).

### Tumor-Targeting Polypeptides (TTPs)

[0226] As discussed above, a TMMP of the present disclosure includes, in the first and/or the second polypeptide, a tumor-targeting polypeptide (TTP), i.e., a polypeptide specific for a cancer-associated epitope. A “cancer-associated” epitope is an epitope that is present in a cancer-associated antigen. In some cases, a TTP is an antibody. In some cases, a TTP is a single-chain T-cell receptor (scTCR).

### Targets

[0227] In some cases, a TTP present in a TMMP of the present disclosure targets a cancer-associated antigen. In some cases, the target of a TTP is a peptide/HLA (pHLA) complex on the surface of a cancer cell, where the peptide can be a cancer-associated peptide (e.g., a peptide fragment of a cancer-associated antigen).

### Cancer-Associated Antigens

[0228] Cancer-associated antigens that can be targeted with a tumor-targeting polypeptide present in a TMPP of the present disclosure include, e.g., NY-ESO (New York Esophageal Squamous Cell Carcinoma 1), MART-1 (melanoma antigen recognized by T cells 1, also known as Melan-A), HPV (human papilloma virus) E6, BCMA (B-cell maturation antigen), CD123, CD133, CD171, CD19, CD20, CD22, CD30, CD33, CEA (carcinoembryonic antigen), EGFR (epidermal growth factor receptor), EGFRvIII (epidermal growth factor receptor variant III), EpCAM (epithelial cell adhesion molecule), EphA2 (ephrin type-A receptor 2), disialoganglioside GD2, GPC3 (glypican-3), HER2, IL13Ralpha2 (Interleukin 13 receptor subunit alpha-2), LeY (a difucosylated type 2 blood group-related antigen), MAGE-A3 (melanoma-associated antigen 3), melanoma glycoprotein, mesothelin, MUC1 (mucin 1), MUC16 (mucin-16), myelin, NKG2D (Natural Killer Group 2D) ligands, PSMA (prostate specific membrane antigen), and ROR1 (type I receptor tyrosine kinase-like orphan receptor).

[0229] Cancer-associated antigens that can be targeted with a TTP present in a TMPP of the present disclosure include, but are not limited to, 17-1A-antigen, alpha-fetoprotein (AFP), alpha-actinin-4, A3, antigen specific for A33 antibody, ART-4, B7, Ba 733, BAGE, bcl-2, bcl-6, BCMA, BrE3-antigen, CA125, CAMEL, CAP-1, carbonic anhydrase IX (CAIX), CASP-8/m, CCL19, CCL21, CD1, CD1a, CD2, CD3, CD4, CD5, CD8, CD11A, CD14, CD15, CD16, CD18, CD19, CD20, CD21, CD22, CD23, CD25, CD29, CD30, CD32b, CD33, CD37, CD38, CD40, CD40L, CD44, CD45, CD46, CD52, CD54, CD55, CD59, CD64, CD66a-e, CD67, CD70, CD70L, CD74, CD79a, CD79b, CD80, CD83, CD95, CD123, CD126, CD132, CD133, CD138, CD147, CD154, CD171, CDCl27, CDK-4/m, CDKN2A, CEA, CEACAM5, CEACAM6, claudin (e.g., claudin-1, claudin-10, claudin-18 (e.g., claudin-18, isoform 2)), complement factors (such as C3, C3a, C3b, C5a and C5), colon-specific antigen-p (CSAp), c-Met, CTLA-4, CXCR4, CXCR7, CXCL12, DAM, Dickkopf-related protein (DKK), ED-B fibronectin, epidermal growth factor receptor (EGFR), EGFRvIII, EGP-1 (TROP-2), EGP-2, ELF2-M, Ep-CAM, EphA2, EphA3, fibroblast activation protein (FAP), fibroblast growth factor (FGF), Flt-1, Flt-3, folate binding protein, folate receptor, G250 antigen, gangliosides (such as GC2, GD3 and GM2), GAGE, GD2, gp100, GPC3, GRO-13, HLA-DR, HM1.24, human chorionic gonadotropin (HCG) and its subunits, HER2, HER3, HMGB-1, hypoxia inducible factor (HIF-1), HIF-1a, HSP70-2M, HST-2, Ia, IFN-gamma, IFN-alpha, IFN-beta, IFN-X, IL-4R, IL-6R, IL-13R, IL13Ralpha2, IL-15R, IL-17R, IL-18R, IL-2, IL-6, IL-8, IL-12, IL-15, IL-17, IL-18, IL-23, IL-25, ILGF, ILGF-1R, insulin-like growth factor-1 (IGF-1), IGF-1R, integrin αVβ3, integrin α5β1, KC4-antigen, killer-cell immunoglobulin-like receptor (KIR), Kras, KS-1-antigen, KS1-4, LDR/FUT, Le^{gamma} macrophage migration inhibitory factor (MIF), MAGE, MAGE-3, MART-1, MART-2, mCRP, MCP-1, melanoma glycoprotein, mesothelin, MIP-1A, MIP-1B, MIF, mucins (such as MUC1, MUC2, MUC3, MUC4, MUC5ac, MUC13, MUC16, MUM-1/2 and MUM-3), NCA66, NCA95, NCA90, Nectin-4, NY-ESO-1, PAM4 antigen, pancreatic cancer mucin, PD-1, PD-L1, PD-1 receptor, placental growth factor, p53, PLAGL2, prostatic acid phosphatase, PSA, PRAME, PSMA, P1GF, RSS, RANTES, SAGE, 5100, survivin, survivin-2B, T101, TAC, TAG-72, tenascin, Thomson-Friedenreich antigens, Tn antigen, TNF-alpha, tumor necrosis antigens, TRAG-3, TRAIL receptors, vascular endothelial growth factor (VEGF), VEGF receptor (VEGFR) and WT-1.

[0230] In some cases, the cancer-associated antigen is an antigen associated with a hematological cancer. Examples of such antigens include, but are not limited to, BCMA, C5, CD19, CD20, CD22, CD25, CD30, CD33, CD38, CD40, CD45, CD52, CD56, CD66, CD74, CD79a, CD79b, CD80, CD138, CTLA-4, CXCR4, DKK, EphA3, GM2, HLA-DR beta, integrin αVβ3, IGF-R1, IL6, KIR, PD-1, PD-L1, TRAILR1, TRAILR2, transferrin receptor, and VEGF. In some cases, the cancer-associated antigen is an antigen expressed by malignant B cells, such as CD19, CD20, CD22, CD25, CD38, CD40, CD45, CD74, CD80, CTLA-4, IGF-R1, IL6, PD-1, TRAILR2, or VEGF.

[0231] In some cases, the cancer-associated antigen is an antigen associated with a solid tumor. Examples of such antigens include, but are not limited to, CAIX, cadherins, CEA, c-MET, CTLA-4, EGFR family members, EpCAM, EphA3, FAP, folate-binding protein, FR-alpha, gangliosides (such as GC2, GD3 and GM2), HER2, HER3, IGF-1R, integrin αVβ3, integrin α5β1, Le^{gamma}, Liv1, mesothelin, mucins, NaPi2b, PD-1, PD-L1, PD-1 receptor, pgA33, PSMA, RANKL, ROR1, TAG-72, tenascin, TRAILR1, TRAILR2, VEGF, VEGFR, and others listed above.

### Peptide/HLA Complexes

[0232] In some cases, the target of a TTP is a peptide/HLA (pHLA) complex on the surface of a cancer cell, where the peptide can be a cancer-associated peptide (e.g., a peptide fragment of a cancer-associated antigen). Cancer-associated peptides are known in the art. In some cases, a cancer-associated peptide is bound to an HLA complex comprising an HLA-A*0201 heavy chain and a β2M polypeptide.

[0233] In some cases, the epitope present in the pHLA on the surface of a cancer cell is bound to an HLA complex comprising an HLA heavy chain such as HLA-A*0101, A*0201, A*0301, A*1101, A*2301, A*2402, A*2407, A*3303, and/or A*3401. In some cases, the epitope present in the pHLA on the surface of a cancer cell is bound to an HLA complex comprising an HLA heavy chain such as HLA-B*0702, B*0801, B*1502, B*3802, B*4001, B*4601, and/or B*5301. In some cases, the epitope present in the pHLA on the surface of a cancer cell is bound to an HLA complex comprising an HLA heavy chain such as C*0102, C*0303, C*0304, C*0401, C*0602, C*0701, C*702, C*0801, and/or C*1502.

[0234] In some cases, the epitope is a cancer-associated epitope of any one of the following cancer-associated antigens: a MUC1 polypeptide, an LMP2 polypeptide, an epidermal growth factor receptor (EGFR) vIII polypeptide, a HER-2/neu polypeptide, a melanoma antigen family A, 3 (MAGE A3) polypeptide, a p53 polypeptide, a mutant p53 polypeptide, an NY-ESO-1 polypeptide, a folate hydrolase (prostate-specific membrane antigen; PSMA) polypeptide, a carcinoembryonic antigen (CEA) polypeptide, a claudin polypeptide (e.g., claudin-1, claudin-10, claudin-18 (e.g., claudin-18, isoform 2)), a Nectin-4 polypeptide, a melanoma antigen recognized by T-cells (melanA/MART1) polypeptide, a Ras polypeptide, a gp100 polypeptide, a proteinase3 (PR1) polypeptide, a bcr-abl polypeptide, a tyrosinase polypeptide, a survivin polypeptide, a prostate specific antigen (PSA) polypeptide, an hTERT polypeptide, a sarcoma translocation breakpoints polypeptide, a synovial sarcoma X (SSX) breakpoint polypeptide, an EphA2 polypeptide, an acid phosphatase, prostate (PAP) polypeptide, a melanoma inhibitor of apoptosis (ML-IAP) polypeptide, an epithelial cell adhesion molecule (EpCAM) polypeptide, an ERG (TMPRSS2 ETS fusion) polypeptide, a NA17 polypeptide, a paired-box-3 (PAX3) polypeptide, an anaplastic lymphoma kinase (ALK) polypeptide, an androgen receptor polypeptide, a cyclin B1 polypeptide, an N-myc proto-oncogene (MYCN) polypeptide, a Ras homolog gene family member C (RhoC) polypeptide, a tyrosinase-related protein-2 (TRP-2) polypeptide, a mesothelin polypeptide, a prostate stem cell antigen (PSCA) polypeptide, a melanoma associated antigen-1 (MAGE A1) polypeptide, a cytochrome P450 1B1 (CYPIB1) polypeptide, a placenta-specific protein 1 (PLAC1) polypeptide, a BORIS polypeptide (also known as CCCTC-binding factor or CTCF), an ETV6-AML polypeptide, a breast cancer antigen NY-BR-1 polypeptide (also referred to as ankyrin repeat domain-containing protein 30A), a regulator of G-protein signaling (RGS5) polypeptide, a squamous cell carcinoma antigen recognized by T-cells (SART3) polypeptide, a carbonic anhydrase IX polypeptide, a paired box-5 (PAX5) polypeptide, an OY-TES1 (testis antigen; also known as acrosin binding protein) polypeptide, a sperm protein 17 polypeptide, a lymphocyte cell-specific protein-tyrosine kinase (LCK) polypeptide, a high molecular weight melanoma associated antigen (HMW-MAA), an A-kinase anchoring protein-4 (AKAP-4), a synovial sarcoma X breakpoint 2 (SSX2) polypeptide, an X antigen family member 1 (XAGE1) polypeptide, a B7 homolog 3 (B7H3; also known as CD276) polypeptide, a legumain polypeptide (LGMN1; also known as asparaginyl endopeptidase), a tyrosine kinase with Ig and EGF homology domains-2 (Tie-2; also known as angiopoietin-1 receptor) polypeptide, a P antigen family member 4 (PAGE4) polypeptide, a vascular endothelial growth factor receptor 2 (VEGF2) polypeptide, a MAD-CT-1 polypeptide, a fibroblast activation protein (FAP) polypeptide, a platelet derived growth factor receptor beta (PDGFβ ) polypeptide, a MAD-CT-2 polypeptide, a Fos-related antigen-1 (FOSL) polypeptide; a human papilloma virus (HPV) antigen; an alpha-feto protein (AFP) antigen; and a Wilms tumor-1 (WT1) antigen.

[0235] For example, in some cases, a TTP present in a TMMP of the present disclosure binds to: a) a WT-1 peptide bound to an HLA complex comprising an HLA heavy chain (e.g., an HLA-A*0201 heavy chain or an HLA-A*2402 heavy chain) and a β2M polypeptide; b) an HPV peptide bound to an HLA complex comprising a class I HLA heavy chain and a β2M polypeptide; c) a mesothelin peptide bound to an HLA complex comprising a class I HLA heavy chain and a β2M polypeptide; d) a Her2 peptide bound to an HLA complex comprising a class I HLA heavy chain and a β2M polypeptide; or e) a BCMA peptide bound to an HLA complex comprising a class I HLA heavy chain and a β2M polypeptide.

[0236] In some cases, a cancer-associated peptide is a peptide of a mesothelin polypeptide having at least 90%, at least 95%, at least 98%, at least 99%, or 100%, amino acid sequence identity to the following mesothelin amino acid sequence:

[0237] LAGE TGQEAAPLDG VLANPPNISS LSPRQLLGFP CAEVSGLSTE RVRELAVALA QKNVKLSTEQ LRCLAHRLSE PPEDLDALPL DLLLFLNPDA FSGPQACTRF FSRITKANVD LLPRGAPERQ RLLPAALACW GVRGSLLSEA DVRALGGLAC DLPGRFVAES AEVLLPRLVS CPGPLDQDQQ EAARAALQGG GPPYGPPSTW SVSTMDALRG LLPVLGQPII RSIPQGIVAA WRQRSSRDPS WRQPERTILR PRFRREVEKT ACPSGKKARE IDESLIFYKK WELEACVDAA LLATQMDRVN AIPFTYEQLD VLKHKLDELY PQGYPESVIQ HLGYLFLKMS PEDIRKWNVT SLETLKALLE VNKGHEMSPQ VATLIDRFVK GRGQLDKDTL DTLTAFYPGY LCSLSPEELS SVPPSSIWAV RPQDLDTCDP RQLDVLYPKA RLAFQNMNGS EYFVKIQSFL GGAPTEDLKA LSQQNVSMDL ATFMKLRTDA VLPLTVAEVQ KLLGPHVEGL KAEERHRPVR DWILRQRQDD LDTLGLGLQG GIPNGYLVLD LSMQEALSGT PCLLGPGPVL TVLALLLAST LA (SEQ ID NO:176). For example, a mesothelin peptide present in a pHLA complex can be: i) KLLGPHVEGL (SEQ ID NO:526); ii) AFYPGYLCSL (SEQ ID NO:177), which can bind HLA-A*2402/02M; iii) VLPLTVAEV (SEQ ID NO:178); iv) ELAVALAQK (SEQ ID NO:179); v) ALQGGGPPY (SEQ ID NO:180); vi) FYPGYLCSL (SEQ ID NO:181); vii) LYPKARLAF (SEQ ID NO:182); viii) LLFLLFSLGWVGPSR (SEQ ID NO:183); ix) VNKGHEMSPQAPRRP (SEQ ID NO:184); x) FMKLRTDAVLPLTVA (SEQ ID NO:185); or xi) DAALLATQMD (SEQ ID NO:186).

[0238] In some cases, a cancer-associated peptide is a peptide of a Her2 polypeptide having at least 90%, at least 95%, at least 98%, at least 99%, or 100%, amino acid sequence identity to the following Her2 (receptor tyrosine-protein kinase erbB2) amino acid sequence:

(SEQ ID NO: 187)
MELAALCRWG LLLALLPPGA ASTQVCTGTD MKLRLPASPE
THLDMLRHLY QGCQVVQGNL ELTYLPTNAS LSFLQDIQEV
QGYVLIAHNQ VRQVPLQRLR IVRGTQLFED NYALAVLDNG
DPLNNTTPVT GASPGGLREL QLRSLTEILK GGVLIQRNPQ
LCYQDTILWK DIFHKNNQLA LTLIDTNRSR ACHPCSPMCK
GSRCWGESSE DCQSLTRTVC AGGCARCKGP LPTDCCHEQC
AAGCTGPKHS DCLACLHFNH SGICELHCPA LVTYNTDTFE
SMPNPEGRYT FGASCVTACP YNYLSTDVGS CTLVCPLHNQ
EVTAEDGTQR CEKCSKPCAR VCYGLGMEHL REVRAVTSAN
IQEFAGCKKI FGSLAFLPES FDGDPASNTA PLQPEQLQVF
ETLEEITGYL YISAWPDSLP DLSVFQNLQV IRGRILHNGA
YSLTLQGLGI SWLGLRSLRE LGSGLALIHH NTHLCFVHTV
PWDQLFRNPH QALLHTANRP EDECVGEGLA CHQLCARGHC
WGPGPTQCVN CSQFLRGQEC VEECRVLQGL PREYVNARHC
LPCHPECQPQ NGSVTCFGPE ADQCVACAHY KDPPFCVARC
PSGVKPDLSY MPIWKFPDEE GACQPCPINC THSCVDLDDK
GCPAEQRASP LTSIISAVVG ILLVVVLGVV FGILIKRRQQ
KIRKYTMRRL LQETELVEPL TPSGAMPNQA QMRILKETEL
RKVKVLGSGA FGTVYKGIWI PDGENVKIPV AIKVLRENTS
PKANKEILDE AYVMAGVGSP YVSRLLGICL TSTVQLVTQL
MPYGCLLDHV RENRGRLGSQ DLLNWCMQIA KGMSYLEDVR
LVHRDLAARN VLVKSPNHVK ITDFGLARLL DIDETEYHAD
GGKVPIKWMA LESILRRRFT HQSDVWSYGV TVWELMTFGA
KPYDGIPARE IPDLLEKGER LPQPPICTID VYMIMVKCWM
IDSECRPRFR ELVSEFSRMA RDPQRFVVIQ NEDLGPASPL
DSTFYRSLLE DDDMGDLVDA EEYLVPQQGF FCPDPAPGAG
GMVHHRHRSS STRNM.

[0239] In some cases, a cancer-associated peptide is a peptide of a BCMA polypeptide having at least 90%, at least 95%, at least 98%, at least 99%, or 100%, amino acid sequence identity to the following BCMA amino acid sequence:

(SEQ ID NO: 188)
MLQMAGQCSQ NEYFDSLLHA CIPCQLRCSS NTPPLTCQRY
CNASVTNSVK GTNAILWTCL GLSLIISLAV FVLMFLLRKI
SSEPLKDEFK NTGSGLLGMA NIDLEKSRTG DEIILPRGLE
YTVEECTCED CIKSKPKVDS DHCFPLPAME EGATILVTTK
TNDYCKSLPA ALSATEIEKS TSAR.

[0240] In some cases, a cancer-associated peptide is a peptide of a WT-1 polypeptide having at least 90%, at least 95%, at least 98%, at least 99%, or 100%, amino acid sequence identity to the following WT-1 amino acid sequence:

(SEQ ID NO: 189)
MDFLLLQDPA STCVPEPASQ HTLRSGPGCL QQPEQQGVRD
PGGIWAKLGA AEASAERLQG RRSRGASGSE PQQMGSDVRD
LNALLPAVPS LGGGGGCALP VSGAAQWAPV LDFAPPGASA
YGSLGGPAPP PAPPPPPPPP PHSFIKQEPS WGGAEPHEEQ
CLSAFTVHFS GQFTGTAGAC RYGPFGPPPP SQASSGQARM
FPNAPYLPSC LESQPAIRNQ GYSTVTFDGT PSYGHTPSHH
AAQFPNHSFK HEDPMGQQGS LGEQQYSVPP PVYGCHTPTD
SCTGSQALLL RTPYSSDNLY QMTSQLECMT WNQMNLGATL
KGHSTGYESD NHTTPILCGA QYRIHTHGVF RGIQDVRRVP
GVAPTLVRSA SETSEKRPFM CAYPGCNKRY FKLSHLQMHS
RKHTGEKPYQ CDFKDCERRF SRSDQLKRHQ RRHTGVKPFQ
CKTCQRKFSR SDHLKTHTRT HTGEKPFSCR WPSCQKKFAR
SDELVRHHNM HQRNMTKLQL AL.

[0241] Non-limiting examples of WT-1 peptides include RMFPNAPYL (SEQ ID NO:190), CMTWNQMN (SEQ ID NO:191), CYTWNQMNL (SEQ ID NO:192), CMTWNQMNLGATLKG (SEQ ID NO:193), WNQMNLGATLKGVAA (SEQ ID NO:194), CMTWNYMNLGATLKG (SEQ ID NO:195), WNYMNLGATLKGVAA (SEQ ID NO:196), MTWNQMNLGATLKGV (SEQ ID NO:197), TWNQMNLGATLKGVA (SEQ ID NO:198), CMTWNLMNLGATLKG (SEQ ID NO:199), MTWNLMNLGATLKGV (SEQ ID NO:200), TWNLMNLGATLKGVA (SEQ ID NO:201), WNLMNLGATLKGVAA (SEQ ID NO:202), MNLGATLK (SEQ ID NO:203), MTWNYMNLGATLKGV (SEQ ID NO:204), TWNYMNLGATLKGVA (SEQ ID NO:205), CMTWNQMNLGATLKGVA (SEQ ID NO:206), CMTWNLMNLGATLKGVA (SEQ ID NO:207), CMTWNYMNLGATLKGVA (SEQ ID NO:208), GYLRNPTAC (SEQ ID NO:209), GALRNPTAL (SEQ ID NO:210), YALRNPTAC (SEQ ID NO:211), GLLRNPTAC (SEQ ID NO:212), RYRPHPGAL (SEQ ID NO:213), YQRPHPGAL (SEQ ID NO:214), RLRPHPGAL (SEQ ID NO:215), RIRPHPGAL (SEQ ID NO:216), QFPNHSFKHEDPMGQ (SEQ ID NO:217), HSFKHEDPY (SEQ ID NO:218), QFPNHSFKHEDPM (SEQ ID NO:219), QFPNHSFKHEDPY (SEQ ID NO:220), KRPFMCAYPGCNK (SEQ ID NO:221), KRPFMCAYPGCYK (SEQ ID NO:222), FMCAYPGCY (SEQ ID NO:223), FMCAYPGCK (SEQ ID NO:224), KRPFMCAYPGCNKRY (SEQ ID NO:225), SEKRPFMCAYPGCNK (SEQ ID NO:226), KRPFMCAYPGCYKRY (SEQ ID NO:227), NLMNLGATL (SEQ ID NO:228), and NYMNLGATL (SEQ ID NO:229).

[0242] In some cases, a cancer-associated peptide is a peptide of a human papillomavirus (HPV) polypeptide having at least 90%, at least 95%, at least 98%, at least 99%, or 100%, amino acid sequence identity to an HPV polypeptide. An HPV peptide can be a peptide of an HPV E6 polypeptide or an HPV E7 polypeptide. The HPV epitope can be an epitope of HPV of any of a variety of genotypes, including, e.g., HPV16, HPV18, HPV31, HPV33, HPV35, HPV39, HPV45, HPV51, HPV52, HPV56, HPV58, HPV59, HPV68, HPV73, or HPV82. Non-limiting examples of HPV peptides include: E6 18-26 (KLPQLCTEL; SEQ ID NO:230); E6 26-34 (LQTTIHDII; SEQ ID NO:231); E6 49-57 (VYDFAFRDL; SEQ ID NO:232); E6 52-60 (FAFRDLCIV; SEQ ID NO:233); E6 75-83 (KFYSKISEY; SEQ ID NO:234); E6 80-88 (ISEYRHYCY; SEQ ID NO:235); E7 7-15 (TLHEYMLDL; SEQ ID NO:236); E7 11-19 (YMLDLQPET; SEQ ID NO:237); E7 44-52 (QAEPDRAHY; SEQ ID NO:238); E7 49-57 (RAHYNIVTF (SEQ ID NO:239); E7 61-69 (CDSTLRLCV; SEQ ID NO:240); and E7 67-76 (LCVQSTHVDI; SEQ ID NO:241); E7 82-90 (LLMGTLGIV; SEQ ID NO:242); E7 86-93 (TLGIVCPI; SEQ ID NO:243); and E7 92-93 (LLMGTLGIVCPI; SEQ ID NO:244).

[0243] In some cases, a cancer-associated peptide is a peptide of a claudin polypeptide having at least 90%, at least 95%, at least 98%, at least 99%, or 100%, amino acid sequence identity to the following claudin-18 (isoform 2) (CLDN 18.2) amino acid sequence:

[0244] MAVTACQGLG FVVSLIGIAG IIAATCMDQW STQDLYNNPV TAVFNYQGLW RSCVRESSGF TECRGYFTLL GLPAMLQAVR ALMIVGIVLG AIGLLVSIFA LKCIRIGSME DSAKANMTLT SGIMFIVSGL CAIAGVSVFA NMLVTNFWMS TANMYTGMGG MVQTVQTRYT FGAALFVGWV AGGLTLIGGV MMCIACRGLA PEETNYKAVS YHASGHSVAY KPGGFKASTG FGSNTKNKKI YDGGARTEDE VQSYPSKHDY V (SEQ ID NO:245). In some cases, a cancer-associated peptide is a peptide of a claudin polypeptide having the amino acid sequence TEDEVQSYPSKHDYV (SEQ ID NO:246) (and having a length of about 15 amino acids) or EVQSYPSKHDYV (SEQ ID NO:247) (and having a length of about 12 amino acids.

### Antibodies

[0245] As noted above, in some cases, a TTP present in a TMMP of the present disclosure is an antibody. In some cases, the TTP is an antibody that is specific for a cancer-associated antigen. In some cases, the TTP is an antibody specific for a peptide/HLA complex on the surface of a cancer cell, where the peptide can be a cancer-associated peptide (e.g., a peptide of a cancer-associated antigen).

[0246] Non-limiting examples of cancer-associated antigen-targeted antibodies that can be included in a TMMP of the present disclosure include, but are not limited to, abituzumab (anti-CD51), LL1 (anti-CD74), LL2 or RFB4 (anti-CD22), veltuzumab (hA20, anti-CD20), rituxumab (anti-CD20), obinutuzumab (GA101, anti-CD20), daratumumab (anti-CD38), lambrolizumab (anti-PD-1 receptor), nivolumab (anti-PD-1 receptor), ipilimumab (anti-CTLA-4), RS7 (anti-TROP-2), PAM4 or KC4 (both anti-mucin), MN-14 (anti-CEA), MN-15 or MN-3 (anti-CEACAM6), Mu-9 (anti-colon-specific antigen-p), Immu 31 (anti-alpha-fetoprotein), R1 (anti-IGF-1R), A19 (anti-CD19), TAG-72 (e.g., CC49), Tn, J591 or HuJ591 (anti-PSMA), AB-PG1-XG1-026 (anti-PSMA dimer), D2/B (anti-PSMA), G250 (anti-carbonic anhydrase IX), L243 (anti-HLA-DR) alemtuzumab (anti-CD52), oportuzumab (anti-EpCAM), bevacizumab (anti-VEGF), cetuximab (anti-EGFR), gemtuzumab (anti-CD33), ibritumomab tiuxetan (anti-CD20); panitumumab (anti-EGFR); tositumomab (anti-CD20); PAM4 (also known as clivatuzumab; anti-mucin), trastuzumab (anti-HER2), pertuzumab (anti-HER2), polatuzumab (anti-CD79b), and anetumab (anti-mesothelin).

[0247] In some cases, the tumor-targeting polypeptide is an antibody. In some cases, the tumor-targeting polypeptide is a single-chain antibody. In some cases, the tumor-targeting polypeptide is a scFv. In some cases, the tumor-targeting polypeptide is a nanobody (also referred to as a single domain antibody (sdAb)). In some cases, the tumor-targeting polypeptide is a heavy chain nanobody. In some cases, the tumor-targeting polypeptide is a light chain nanobody.

[0248] VH and VL amino acid sequences of various tumor antigen-binding antibodies are known in the art, as are the light chain and heavy chain CDRs of such antibodies. See, e.g., Ling et al. (2018) Frontiers Immunol. 9:469; WO 2005/012493; US 2019/0119375; US 2013/0066055. The following are non-limiting examples of tumor antigen-binding antibodies.

### Anti-Her2

[0249] In some cases, an anti-Her2 antibody comprises: a) a light chain comprising an amino acid sequence having at least 90%, at least 95%, at least 98%, at least 99%, or 100%, amino acid sequence identity to the following amino acid sequence:

[0250] DIQMTQSPSSLSASVGDRVTITCRASQDVNTAVAWYQQKPGKAPKLLIYSASFLY SGVPSRFSGSRSGTDFTLTISSLQPEDFATYYCQQHYTTPPTFGQGTKVEIKRTVAAPSVFIFPPSD EQLKSGTASVVCLLNNFYPREAKVQWKVDNALQSGNSQESVTEQDSKDSTYSLSSTLTLSKAD YEKHKVYACEVTHQGLSSPVTKSFNRGEC (SEQ ID NO:248); and b) a heavy chain comprising an amino acid sequence having at least 90%, at least 95%, at least 98%, at least 99%, or 100%, amino acid sequence identity to the following amino acid sequence:

(SEQ ID NO: 249)
EVQLVESGGGLVQPGGSLRLSCAASGFNIKDTYIHWVRQAPGKGLEWVA
RIYPTNGYTRYADSVKGRFTISADTSKNTAYLQMNSLRAEDTAVYYCSR
WGGDGFYAMDYWGQGTLVTVSSASTKGPSVFPLAPSSKSTSGGTAALGC
LVKDYFPEPVTVSWNSGALTSGVHTFPAVLQSSGLYSLSSVVTVPSSSL
GTQTYICNVNHKPSNTKVDKKVEPKSCDKTHTCPPCPAPELLGGPSVFL
FPPKPKDTLMISRTPEVTCVVVDVSHEDPEVKFNWYVDGVEVHNAKTKP
REEQYNSTYRVVSVLTVLHQDWLNGKEYKCKVSNKALPAPIEKTISKAK
GQPREPQVYTLPPSREEMTKNQVSLTCLVKGFYPSDIAVEWESNGQPEN
NYKTTPPVLDSDGSFFLYSKLTVDKSRWQQGNVFSCSVMHEALHNHYTQ
KSLSLSPGK.

[0251] In some cases, an anti-Her2 antibody comprises a light chain variable region (VL) present in the light chain amino acid sequence provided above; and a heavy chain variable region (VH) present in the heavy chain amino acid sequence provided above. For example, an anti-Her2 antibody can comprise: a) a VL comprising an amino acid sequence having at least 90%, at least 95%, at least 98%, at least 99%, or 100%, amino acid sequence identity to the amino acid sequence:

[0252] DIQMTQSPSSLSASVGDRVTITCRASQDVNTAVAWYQQKPGKAPKLLIYSASFLYSGVPSRFSGS RSGTDFTLTISSLQPEDFATYYCQQHYTTPPTFGQGTKVEIK (SEQ ID NO:250); and b) a VH comprising an amino acid sequence having at least 90%, at least 95%, at least 98%, at least 99%, or 100%, amino acid sequence identity to the amino acid sequence:

[0253] EVQLVESGGGLVQPGGSLRLSCAASGFNIKDTYIHWVRQAPGKGLEWVARIYPTNGYTRYADS VKGRFTISADTSKNTAYLQMNSLRAEDTAVYYCSRWGGDGFYAMDYWGQGTLVTVSS (SEQ ID NO:251). In some cases, an anti-Her2 antibody comprises, in order from N-terminus to C-terminus: a) a VH comprising an amino acid sequence having at least 90%, at least 95%, at least 98%, at least 99%, or 100%, amino acid sequence identity to the amino acid sequence:

[0254] EVQLVESGGGLVQPGGSLRLSCAASGFNIKDTYIHWVRQAPGKGLEWVARIYPTNGYTRYADS VKGRFTISADTSKNTAYLQMNSLRAEDTAVYYCSRWGGDGFYAMDYWGQGTLVTVSS (SEQ ID NO:252); b) a linker; and c) a VL comprising an amino acid sequence having at least 90%, at least 95%, at least 98%, at least 99%, or 100%, amino acid sequence identity to the amino acid sequence:

[0255] DIQMTQSPSSLSASVGDRVTITCRASQDVNTAVAWYQQKPGKAPKLLIYSASFLYSGVPSRFSGS RSGTDFTLTISSLQPEDFATYYCQQHYTTPPTFGQGTKVEIK (SEQ ID NO:253). Suitable linkers are described elsewhere herein and include, e.g., (GGGGS)n (SEQ ID NO: 254), where n is an integer from 1 to 10 (e.g., 1, 2, 3, 4, 5, 6, 7, 8, 9, or 10).

[0256] In some cases, an anti-Her2 antibody comprises VL CDR1, VL CDR2, and VL CDR3 present in the light chain amino acid sequence provided above; and VH CDR1, CDR2, and CDR3 present in the heavy chain amino acid sequence provided above. In some cases, the V_{H} and V_{L} CDRs are as defined by Kabat (see, e.g., Table 2, above; and Kabat 1991). In some cases, the V_{H} and V_{L} CDRs are as defined by Chothia (see, e.g., Table 2, above; and Chothia 1987).

[0257] For example, an anti-Her2 antibody can comprise a VL CDR1 having the amino acid sequence RASQDVNTAVA (SEQ ID NO:255); a VL CDR2 having the amino acid sequence SASFLY (SEQ ID NO:256); a VL CDR3 having the amino acid sequence QQHYTTPP (SEQ ID NO:257); a VH CDR1 having the amino acid sequence GFNIKDTY (SEQ ID NO:258); a VH CDR2 having the amino acid sequence IYPTNGYT (SEQ ID NO:259); and a VH CDR3 having the amino acid sequence SRWGGDGFYAMDY (SEQ ID NO:260).

[0258] In some cases, an anti-Her2 antibody is a scFv antibody. For example, an anti-Her2 scFv can comprise an amino acid sequence having at least 90%, at least 95%, at least 98%, at least 99%, or 100%, amino acid sequence identity to the following amino acid sequence:

(SEQ ID NO: 261)
EVQLVESGGGLVQPGGSLRLSCAASGFNIKDTYIHWVRQAPGKGLEWVAR
IYPTNGYTRYADSVKGRFTISADTSKNTAYLQMNSLRAEDTAVYYCSRWG
GDGFYAMDYWGQGTLVTVSSGGGGSGGGGSGGGGSDIQMTQSPSSLSASV
GDRVTITCRASQDVNTAVAWYQQKPGKAPKLLIYSASFLYSGVPSRFSGS
RSGTDFTLTISSLQPEDFATYYCQQHYTTPPTFGQGTKVEIK.

[0259] As another example, in some cases, an anti-Her2 antibody comprises: a) a light chain variable region (VL) comprising an amino acid sequence having at least 90%, at least 95%, at least 98%, at least 99%, or 100%, amino acid sequence identity to the following amino acid sequence:

[0260] DIQMTQSPSSLSASVGDRVTITCKASQDVSIGVAWYQQKPGKAPKLLIYSASYRY TGVPSRFSGSGSGTDFTLTISSLQPEDFATYYCQQYYIYPYTFGQGTKVEIKRTVAAPSVFIFPPSD EQLKSGTASVVCLLNNFYPREAKVQWKVDNALQSGNSQESVTEQDSKDSTYSLSSTLTLSKAD YEKHKVYACEVTHQGLSSPVTKSFNRGEC (SEQ ID NO:262); and b) a heavy chain variable region (VH) comprising an amino acid sequence having at least 90%, at least 95%, at least 98%, at least 99%, or 100%, amino acid sequence identity to the following amino acid sequence:

(SEQ ID NO: 263)
EVQLVESGGGLVQPGGSLRLSCAASGFTFTDYTMDWVRQAPGKGLEWVADV
NPNSGGSIYNQRFKGRFTLSVDRSKNTLYLQMNSLRAEDTAVYYCARNLGP
SFYFDYWGQGTLVTVSSASTKGPSVFPLAPSSKSTSGGTAALGCLVKDYFP
EPVTVSWNSGALTSGVHTFPAVLQSSGLYSLSSVVTVPSSSLGTQTYICNV
NHKPSNTKVDKKVEPKSCDKTHTCPPCPAPELLGGPSVFLFPPKPKDTLMI
SRTPEVTCVVVDVSHEDPEVKFNWYVDGVEVHNAKTKPREEQYNSTYRVVS
VLTVLHQDWLNGKEYKCKVSNKALPAPIEKTISKAKGQPREPQVYTLPPSR
EEMTKNQVSLTCLVKGFYPSDIAVEWESNGQPENNYKTTPPVLDSDGSFFL
YSKLTVDKSRWQQGNVFSCSVMHEALHNHYTQKSLSLSPG.

[0261] In some cases, an anti-Her2 antibody comprises a VL present in the light chain amino acid sequence provided above; and a VH present in the heavy chain amino acid sequence provided above. For example, an anti-Her2 antibody can comprise: a) a VL comprising an amino acid sequence having at least 90%, at least 95%, at least 98%, at least 99%, or 100%, amino acid sequence identity to the amino acid sequence:

DIQMTQSPSSLSASVGDRVTITCKASQDVSIGVAWYQQKPGKAPKLLIYSASYRYTGVPSRFSGS GSGTDFTLTISSLQPEDFATYYCQQYYIYPYTFGQGTKVEIK (SEQ ID NO:264); and b) a VH comprising an amino acid sequence having at least 90%, at least 95%, at least 98%, at least 99%, or 100%, amino acid sequence identity to the amino acid sequence:

(SEQ ID NO: 265)
[sequence omitted]

[0262] In some cases, an anti-Her2 antibody comprises VL CDR1, VL CDR2, and VL CDR3 present in the light chain amino acid sequence provided above; and VH CDR1, CDR2, and CDR3 present in the heavy chain amino acid sequence provided above. In some cases, the V_{H} and V_{L} CDRs are as defined by Kabat (see, e.g., Table 2, above; and Kabat 1991). In some cases, the V_{H} and V_{L} CDRs are as defined by Chothia (see, e.g., Table 2, above; and Chothia 1987).

[0263] For example, an anti-HER2 antibody can comprise a VL CDR1 having the amino acid sequence KASQDVSIGVA (SEQ ID NO:266); a VL CDR2 having the amino acid sequence SASYRY (SEQ ID NO:267); a VL CDR3 having the amino acid sequence QQYYIYPY (SEQ ID NO:268); a VH CDR1 having the amino acid sequence GFTFTDYTMD (SEQ ID NO:269); a VH CDR2 having the amino acid sequence ADVNPNSGGSIYNQRFKG (SEQ ID NO:270); and a VH CDR3 having the amino acid sequence ARNLGPSFYFDY (SEQ ID NO:271).

[0264] In some cases, an anti-Her2 antibody is a scFv. For example, in some cases, an anti-Her2 scFv comprises an amino acid sequence having at least 90%, at least 95%, at least 98%, at least 99%, or 100%, amino acid sequence identity to the following amino acid sequence:

(SEQ ID NO: 272)
EVQLVESGGGLVQPGGSLRLSCAASGFNIKDTYIHWVRQAPGKGLEWVARI
YPTNGYTRYADSVKGRFTISADTSKNTAYLQMNSLRAEDTAVYYCSRWGGD
GFYAMDYWGQGTLVTVSSGGGGSGGGGSGGGGSDIQMTQSPSSLSASVGDR
VTITCRASQDVNTAVAWYQQKPGKAPKLLIYSASFLYSGVPSRFSGSRSGT
DFTLTISSLQPEDFATYYCQQHYTTPPTFGQGTKVEIK.

### Anti-CD19

[0265] Anti-CD19 antibodies are known in the art; and the VH and VL, or the VH and VL CDRs, of any anti-CD19 antibody can be used in a TMMP of the present disclosure. See e.g., WO 2005/012493.

[0266] In some cases, an anti-CD19 antibody includes a VL CDR1 comprising the amino acid sequence KASQSVDYDGDSYLN (SEQ ID NO:273); a VL CDR2 comprising the amino acid sequence DASNLVS (SEQ ID NO:274); and a VL CDR3 comprising the amino acid sequence QQSTEDPWT (SEQ ID NO:275). In some cases, an anti-CD19 antibody includes a VH CDR1 comprising the amino acid sequence SYWMN (SEQ ID NO:276); a VH CDR2 comprising the amino acid sequence QIWPGDGDTNYNGKFKG (SEQ ID NO:277); and a VH CDR3 comprising the amino acid sequence RETTTVGRYYYAMDY (SEQ ID NO:278). In some cases, an anti-CD19 antibody includes a VL CDR1 comprising the amino acid sequence KASQSVDYDGDSYLN (SEQ ID NO:279); a VL CDR2 comprising the amino acid sequence DASNLVS (SEQ ID NO:280); a VL CDR3 comprising the amino acid sequence QQSTEDPWT (SEQ ID NO:281); a VH CDR1 comprising the amino acid sequence SYWMN (SEQ ID NO:282); a VH CDR2 comprising the amino acid sequence QIWPGDGDTNYNGKFKG (SEQ ID NO:283); and a VH CDR3 comprising the amino acid sequence RETTTVGRYYYAMDY (SEQ ID NO:284).

[0267] In some cases, an anti-CD19 antibody is a scFv. For example, in some cases, an anti-CD19 scFv comprises an amino acid sequence having at least 90%, at least 95%, at least 98%, at least 99%, or 100%, amino acid sequence identity to the following amino acid sequence:

(SEQ ID NO: 285)
DIQLTQSPASLAVSLGQRATISCKASQSVDYDGDSYLNWYQQIPGQPPKLL
IYDASNLVSGIPPRFSGSGSGTDFTLNIHPVEKVDAATYHCQQSTEDPWTF
GGGTKLEIKGGGGSGGGGSGGGGSQVQLQQSGAELVRPGSSVKISCKASGY
AFSSYWMNWVKQRPGQGLEWIGQIWPGDGDTNYNGKFKGKATLTADESSST
AYMQLSSLASEDSAVYFCARRETTTVGRYYYAMDYWGQGTTVTVS.

### Anti-Mesothelin

[0268] Anti-mesothelin antibodies are known in the art; and the VH and VL, or the VH and VL CDRs, of any anti-mesothelin antibody can be used in a TMMP of the present disclosure. See, e.g., U.S. 2019/0000944; WO 2009/045957; WO 2014/031476; U.S. Pat. No. 8,460,660; US 2013/0066055; and WO 2009/068204.

[0269] In some cases, an anti-mesothelin antibody comprises: a) a light chain comprising an amino acid sequence having at least 90%, at least 95%, at least 98%, at least 99%, or 100%, amino acid sequence identity to the following amino acid sequence:

(SEQ ID NO: 286)
DIALTQPASVSGSPGQSITISCTGTSSDIGGYNSVSWYQQHPGKAPKLMIY
GVNNRPSGVSNRFSGSKSGNTASLTISGLQAEDEADYYCSSYDIESATPVF
GGGTKLTVLGQPKAAPSVTLFPPSSEELQANKATLVCLISDFYPGAVTVAW
KGDSSPVKAGVETTTPSKQSNNKYAASSYLSLTPEQWKSHRSYSCQVTHEG
STVEKTVAPTESS;

and

[0270] b) a heavy chain comprising an amino acid sequence having at least 90%, at least 95%, at least 98%, at least 99%, or 100%, amino acid sequence identity to the following amino acid sequence

(SEQ ID NO: 287)
QVELVQSGAEVKKPGESLKISCKGSGYSFTSYWIGWVRQAPGKGLEWMGII
DPGDSRTRYSPSFQGQVTISADKSISTAYLQWSSLKASDTAMYYCARGQLY
GGTYMDGWGQGTLVTVSSASTKGPSVFPLAPSSKSTSGGTAALGCLVKDYF
PEPVTVSWNSGALTSGVHTFPAVLQSSGLYSLSSVVTVPSSSLGTQTYICN
VNHKPSNTKVDKKVEPKSCDKTHTCPPCPAPELLGGPSVFLFPPKPKDTLM
ISRTPEVTCVVVDVSHEDPEVKFNWYVDGVEVHNAKTKPREEQYNSTYRVV
SVLTVLHQDWLNGKEYKCKVSNKALPAPIEKTISKAKGQPREPQVYTLPPS
RDELTKNQVSLTCLVKGFYPSDIAVEWESNGQPENNYKTTPPVLDSDGSFF
LYSKLTVDKSRWQQGNVFSCSVMHEALHNHYTQKSLSLSPGK.

[0271] In some cases, an anti-mesothelin antibody comprises a VL present in the light chain amino acid sequence provided above; and a VH present in the heavy chain amino acid sequence provided above. For example, an anti-mesothelin antibody can comprise: a) a VL comprising an amino acid sequence having at least 90%, at least 95%, at least 98%, at least 99%, or 100%, amino acid sequence identity to the amino acid sequence:

DIALTQPASVSGSPGQSITISCTGTSSDIGGYNSVSWYQQHPGKAPKLMIYGVNNRPSGVSNRFS GSKSGNTASLTISGLQAEDEADYYCSSYDIESATPVFGGGTK (SEQ ID NO: 288); and b) a VH comprising an amino acid sequence having at least 90%, at least 95%, at least 98%, at least 99%, or 100%, amino acid sequence identity to the amino acid sequence:

(SEQ ID NO: 289)
QVELVQSGAEVKKPGESLKISCKGSGYSFTSYWIGWVRQAPGKGLEWMGII
DPGDSRTRYSPSFQGQVTISADKSISTAYLQWSSLKASDTAMYYCARGQLY
GGTYMDGWGQGTLVTVSS.

[0272] In some cases, an anti-mesothelin antibody comprises VL CDR1, VL CDR2, and VL CDR3 present in the light chain amino acid sequence provided above; and VH CDR1, CDR2, and CDR3 present in the heavy chain amino acid sequence provided above. In some cases, the V_{H} and V_{L} CDRs are as defined by Kabat (see, e.g., Table 2, above; and Kabat 1991). In some cases, the V_{H} and V_{L} CDRs are as defined by Chothia (see, e.g., Table 2, above; and Chothia 1987).

[0273] For example, an anti-mesothelin antibody can comprise a VL CDR1 having the amino acid sequence TGTSSDIGGYNSVS (SEQ ID NO:290); a VL CDR2 having the amino acid sequence LMIYGVNNRPS (SEQ ID NO:291); a VL CDR3 having the amino acid sequence SSYDIESATP (SEQ ID NO:292); a VH CDR1 having the amino acid sequence GYSFTSYWIG (SEQ ID NO:293); a VH CDR2 having the amino acid sequence WMGIIDPGDSRTRYSP (SEQ ID NO:294); and a VH CDR3 having the amino acid sequence GQLYGGTYMDG (SEQ ID NO:295).

[0274] An anti-mesothelin antibody can be a scFv. As one non-limiting example, an anti-mesothelin scFv can comprise the following amino acid sequence:

(SEQ ID NO: 296)
QVQLQQSGAEVKKPGASVKVSCKASGYTFTGYYMHWVRQAPGQGLEWMGRI
NPNSGGTNYAQKFQGRVTMTRDTSISTAYMELSRLRSEDTAVYYCARGRYY
GMDVWGQGTMVTVSSGGGGSGGGGSGGGGSGGGGSEIVLTQSPATLSLSPG
ERATISCRASQSVSSNFAWYQQRPGQAPRLLIYDASNRATGIPPRFSGSGS
GTDFTLTISSLEPEDFAAYYCHQRSNWLYTFGQGTKVDIK,

where VH CDR1, CDR2, and CDR3 are underlined; and VL CDR1, CDR2, and CDR3 are bolded and underlined.

[0275] As one non-limiting example, an anti-mesothelin scFv can comprise the following amino acid sequence:

(SEQ ID NO: 297)
QVQLVQSGAEVKKPGASVKVSCKASGYTFTGYYMHWVRQAPGQGLEWMGWI
NPNSGGTNYAQKFQGRVTMTRDTSISTAYMELSRLRSDDTAVYYCARDLRR
TVVTPRAYYGMDVWGQGTTVTVSSGGGGSGGGGSGGGGSGGGGSDIQLTQS
PSTLSASVGDRVTITCQASQDISNSLNWYQQKAGKAPKLLIYDASTLETGV
PSRFSGSGSGTDFSFTISSLQPEDIATYYCQQHDNLPLTFGQGTKVEIK,

where VH CDR1, CDR2, and CDR3 are underlined; and VL CDR1, CDR2, and CDR3 are bolded and underlined.

### Anti-BCMA

[0276] Anti-BCMA (B-cell maturation antigen) antibodies are known in the art; and the VH and VL, or the VH and VL CDRs, of any anti-BCMA antibody can be used in a TMMP of the present disclosure. See, e.g., WO 2014/089335; US 2019/0153061; and WO 2017/093942.

[0277] In some cases, an anti-BCMA antibody comprises: a) a light chain comprising an amino acid sequence having at least 90%, at least 95%, at least 98%, at least 99%, or 100%, amino acid sequence identity to the following amino acid sequence:

(SEQ ID NO: 298)
QSVLTQPPSASGTPGQRVTISCSGSSSNIGSNTVNWYQQLPGTAPKLLIFN
YHQRPSGVPDRFSGSKSGSSASLAISGLQSEDEADYYCAAWDDSLNGWVFG
GGTKLTVLGQPKAAPSVTLFPPSSEELQANKATLVCLISDFYPGAVTVAWK
SADSSPVKAGVETTTPDSKQSNNKYAASSYLLTPEQWKSHRSYSCQVTHEG
STVEKTVAPTECS;

and

[0278] b) a heavy chain comprising an amino acid sequence having at least 90%, at least 95%, at least 98%, at least 99%, or 100%, amino acid sequence identity to the following amino acid sequence

(SEQ ID NO: 299)
EVQLVESGGGLVKPGGSLRLSCAASGFTFGDYALSWFRQAPGKGLEWVGVS
RSKAYGGTTDYAASVKGRFTISRDDSKSTAYLQMNSLKTEDTAVYYCASSG
YSSGWTPFDYWGQGTLVTVSSASTKGPSVFPLAPSSKSTSGGTAALGCLVK
DYFPEPVTVSWNSGALTSGVHTFPAVLQSSGLYSLSSVVTVPSSSLGTQTY
ICNVNHKPSNTKVDKKVEPKSCDKTHTCPPCPAPELLGGPSVFLFPPKPKD
TLMISRTPEVTCVVVDVSHEDPEVKFNWYVDGVEVHNAKTKPREEQYNSTY
RVVSVLTVLHQDWLNGKEYKCKVSNKALPAPIEKTISKAKGQPREPQVYTL
PPSREEMTKNQVSLTCLVKGFYPSDIAVEWESNGQPENNYKTTPPVLDSDG
SFFLYSKLTVDKSRWQQGNVFSCSVMHEALHNHYTQKSLSLSPGK.

[0279] In some cases, an anti-BCMA antibody comprises a VL present in the light chain amino acid sequence provided above; and a VH present in the heavy chain amino acid sequence provided above. For example, an anti-BCMA antibody can comprise: a) a VL comprising an amino acid sequence having at least 90%, at least 95%, at least 98%, at least 99%, or 100%, amino acid sequence identity to the amino acid sequence:

[0280] QSVLTQPPSASGTPGQRVTISCSGSSSNIGSNTVNWYQQLPGTAPKLLIFNYHQRP SGVPDRFSGSKSGSSASLAISGLQSEDEADYYCAAWDDSLNGWVFGGGTKLTVLG (SEQ ID NO:300); and b) a VH comprising an amino acid sequence having at least 90%, at least 95%, at least 98%, at least 99%, or 100%, amino acid sequence identity to the amino acid sequence:

(SEQ ID NO: 301)
EVQLVESGGGLVKPGGSLRLSCAASGFTFGDYALSWFRQAPGKGLEWVGVS
RSKAYGGTTDYAASVKGRFTISRDDSKSTAYLQMNSLKTEDTAVYYCASSG
YSSGWTPFDYWGQGTLVTVSSASTKGPSV.

[0281] In some cases, an anti-BCMA antibody comprises VL CDR1, VL CDR2, and VL CDR3 present in the light chain amino acid sequence provided above; and VH CDR1, CDR2, and CDR3 present in the heavy chain amino acid sequence provided above. In some cases, the V_{H} and V_{L} CDRs are as defined by Kabat (see, e.g., Table 2, above; and Kabat 1991). In some cases, the V_{H} and V_{L} CDRs are as defined by Chothia (see, e.g., Table 2, above; and Chothia 1987).

[0282] For example, an anti-BCMA antibody can comprise a VL CDR1 having the amino acid sequence SSNIGSNT (SEQ ID NO:302), a VL CDR2 having the amino acid sequence NYH, a VL CDR3 having the amino acid sequence AAWDDSLNGWV (SEQ ID NO:303)), a VH CDR1 having the amino acid sequence GFTFGDYA (SEQ ID NO:304), a VH CDR2 having the amino acid sequence SRSKAYGGTT (SEQ ID NO:305), and a VH CDR3 having the amino acid sequence ASSGYSSGWTPFDY (SEQ ID NO:306).

[0283] An anti-BCMA antibody can be a scFv. As one non-limiting example, an anti-BCMA scFv can comprise the following amino acid sequence:

(SEQ ID NO: 307)
QVQLVQSGAEVKKPGSSVKVSCKASGGTFSNYWMHWVRQAPGQGLEWMGAT
YRGHSDTYYNQKFKGRVTITADKSTSTAYMELSSLRSEDTAVYYCARGAIY
NGYDVLDNWGQGTLVTVSSGGGGSGGGGSGGGGSGGGGSDIQMTQSPSSLS
ASVGDRVTITCSASQDISNYLNWYQQKPGKAPKLLIYYTSNLHSGVPSRFS
GSGSGTDFTLTISSLQPEDFATYYCQQYRKLPWTFGQGTKLEIKR.

[0284] As another example, an anti-BCMA scFv can comprise the following amino acid sequence:

(SEQ ID NO: 308)
DIQMTQSPSSLSASVGDRVTITCSASQDISNYLNWYQQKPGKAPKLLIYYT
SNLHSGVPSRFSGSGSGTDFTLTISSLQPEDFATYYCQQYRKLPWTFGQGT
KLEIKRGGGGSGGGGSGGGGSGGGGSQVQLVQSGAEVKKPGSSVKVSCKAS
GGTFSNYWMHWVRQAPGQGLEWMGATYRGHSDTYYNQKFKGRVTITADKST
STAYMELSSLRSEDTAVYYCARGAIYNGYDVLDNWGQGTLVTVSS.

[0285] In some cases, an anti-BCMA antibody can comprise a VL CDR1 having the amino acid sequence SASQDISNYLN (SEQ ID NO:309); a VL CDR2 having the amino acid sequence YTSNLHS (SEQ ID NO:310); a VL CDR3 having the amino acid sequence QQYRKLPWT (SEQ ID NO:311); a VH CDR1 having the amino acid sequence NYWMH (SEQ ID NO:312); a VH CDR2 having the amino acid sequence ATYRGHSDTYYNQKFKG (SEQ ID NO:313); and a VH CDR3 having the amino acid sequence GAIYNGYDVLDN (SEQ ID NO:314).

[0286] In some cases, an anti-BCMA antibody comprises: a) a light chain comprising an amino acid sequence having at least 90%, at least 95%, at least 98%, at least 99%, or 100%, amino acid sequence identity to the following amino acid sequence:

(SEQ ID NO: 315)
DIQMTQSPSSLSASVGDRVTITCSASQDISNYLNWYQQKPGKAPKLLIYYT
SNLHSGVPSRFSGSGSGTDFTLTISSLQPEDFATYYCQQYRKLPWTFGQGT
KLEIKR.

[0287] In some cases, an anti-BCMA antibody comprises: a) a heavy chain comprising an amino acid sequence having at least 90%, at least 95%, at least 98%, at least 99%, or 100%, amino acid sequence identity to the following amino acid sequence:

(SEQ ID NO: 316)
QVQLVQSGAEVKKPGSSVKVSCKASGGTFSNYWMHWVRQAPGQG
LEWMGATYRGHSDTYYNQKFKGRVTITADKSTSTAYMELSSLRS
EDTAVYYCARGAIYDGYDVLDNWGQGTLVTVSS.

[0288] In some cases, an anti-BCMA antibody (e.g., an antibody referred to in the literature as belantamab) comprises a light chain comprising the amino acid sequence:

DIQMTQSPSSLSASVGDRVTITCSASQDISNYLNWYQQKPGKAPKLLIYYTSNLHSGVPSRFSGS GSGTDFTLTISSLQPEDFATYYCQQYRKLPWTFGQGTKLEIKR (SEQ ID NO:317); and a heavy chain comprising the amino acid sequence:

(SEQ ID NO: 318)
QVQLVQSGAEVKKPGSSVKVSCKASGGTFSNYWMHWVRQAPGQG
LEWMGATYRGHSDTYYNQKFKGRVTITADKSTSTAYMELSSLRS
EDTAVYYCARGAIYDGYDVLDNWGQGTLVTVSS.

[0289] In some cases, the anti-BCMA antibody has a cancer chemotherapeutic agent linked to the antibody. For example, in some cases, the anti-BCMA antibody is GSK2857916 (belantamab-mafodotin), where monomethyl auristatin F (MMAF) is linked via a maleimidocaproyl linker to the anti-BCMA antibody belantamab.

### Anti-MUC1

[0290] In some cases, a TTP present in a TMMP of the present disclosure is an antibody specific for MUC1. For example, a TTP can be specific for a MUC1 polypeptide present on a cancer cell. In some cases, the TTP is specific for the cleaved form of MUC1; see, e.g., Fessler et al. (2009) Breast Cancer Res. Treat. 118:113. In some cases, the TTP is an antibody specific for a glycosylated MUC1 peptide; see, e.g., Naito et al. (2017) ACS Omega 2:7493; and U.S. Pat. No. 10,017,580.

[0291] As one non-limiting example, a TTP can be a single-chain Fv specific for MUC1. See, e.g., Singh et al. (2007) Mol. Cancer Ther. 6:562; Thie et al. (2011) PLoSOne 6:e15921; Imai et al. (2004) Leukemia 18:676; Posey et al. (2016) Immunity 44:1444; EP3130607; EP3164418; WO 2002/044217; and US 2018/0112007. In some cases, a TTP is a scFv specific for the MUC1 peptide VTSAPDTRPAPGSTAPPAHG (SEQ ID NO:319). In some cases, a TTP is a scFv specific for the MUC1 peptide SNIKFRPGSVVVQLTLAFREGTINVHDVETQFNQYKTEAASRY (SEQ ID NO:320). In some cases, a TTP is a scFv specific for the MUC1 peptide SVVVQLTLAFREGTINVHDVETQFNQYKTEAASRY (SEQ ID NO:321). In some cases, a TTP is a scFv specific for the MUC1 peptide LAFREGTINVHDVETQFNQY (SEQ ID NO:322). In some cases, a TTP is a scFv specific for the MUC1 peptide SNIKFRPGSVVVQLTLAAFREGTIN (SEQ ID NO:323).

[0292] As an example, an anti-MUC1 antibody can comprise: a VH CDR1 having the amino acid sequence RYGMS (SEQ ID NO:324); a VH CDR2 having the amino acid sequence TISGGGTYIYYPDSVKG (SEQ ID NO:325); a VH CDR3 having the amino acid sequence DNYGRNYDYGMDY (SEQ ID NO:326); a VL CDR1 having the amino acid sequence SATSSVSYIH (SEQ ID NO:327); a VL CDR2 having the amino acid sequence STSNLAS (SEQ ID NO:328); and a VL CDR3 having the amino acid sequence QQRSSSPFT (SEQ ID NO:329). See, e.g., US 2018/0112007.

[0293] As another example, an anti-MUC1 antibody can comprise a VH CDR1 having the amino acid sequence GYAMS (SEQ ID NO:330); a VH CDR2 having the amino acid sequence TISSGGTYIYYPDSVKG (SEQ ID NO:331); a VH CDR3 having the amino acid sequence LGGDNYYEYFDV (SEQ ID NO:332); a VL CDR1 having the amino acid sequence RASKSVSTSGYSYMH (SEQ ID NO:333); a VL CDR2 having the amino acid sequence LASNLES (SEQ ID NO:334); and a VL CDR3 having the amino acid sequence QHSRELPFT (SEQ ID NO:335). See, e.g., US 2018/0112007.

[0294] As another example, an anti-MUC1 antibody can comprise a VH CDR1 having the amino acid sequence DYAMN (SEQ ID NO:336); a VH CDR2 having the amino acid sequence VISTFSGNINFNQKFKG (SEQ ID NO:337); a VH CDR3 having the amino acid sequence SDYYGPYFDY (SEQ ID NO:338); a VL CDR1 having the amino acid sequence RSSQTIVHSNGNTYLE (SEQ ID NO:339); a VL CDR2 having the amino acid sequence KVSNRFS (SEQ ID NO:340); and a VL CDR3 having the amino acid sequence (FQGSHVPFT (SEQ ID NO:341). See, e.g., US 2018/0112007.

[0295] As another example, an anti-MUC1 antibody can comprise a VH CDR1 having the amino acid sequence GYAMS (SEQ ID NO:342); a VH CDR2 having the amino acid sequence TISSGGTYIYYPDSVKG (SEQ ID NO:343); a VH CDR3 having the amino acid sequence LGGDNYYEY (SEQ ID NO:344); a VL CDR1 having the amino acid sequence TASKSVSTSGYSYMH (SEQ ID NO:345); a VL CDR2 having the amino acid sequence LVSNLES (SEQ ID NO:346); and a VL CDR3 having the amino acid sequence QHIRELTRSE (SEQ ID NO:347). See, e.g., US 2018/0112007.

### Anti-MUC16

[0296] In some cases, a TTP present in a TMMP of the present disclosure is an antibody specific for MUC16 (also known as CA125). See, e.g., Yin et al. (2002) Int. J. Cancer 98:737. For example, a TTP can be specific for a MUC16 polypeptide present on a cancer cell. See, e.g., US 2018/0118848; and US 2018/0112008. In some cases, a MUC16-specific TTP is a scFv. In some cases, a MUC16-specific TTP is a nanobody.

[0297] As one example, an anti-MUC16 antibody can comprise a VH CDR1 having the amino acid sequence GFTFSNYY (SEQ ID NO:348); a VH CDR2 having the amino acid sequence ISGRGSTI (SEQ ID NO:349); a VH CDR3 having the amino acid sequence VKDRGGYSPY (SEQ ID NO:350); a VL CDR1 having the amino acid sequence QSISTY (SEQ ID NO:351); a VL CDR2 having the amino acid sequence TAS; and a VL CDR3 having the amino acid sequence QQSYSTPPIT (SEQ ID NO:352). See, e.g., US 2018/0118848.

### Anti-Claudin-18.2

[0298] In some cases, a TTP present in a TMMP of the present disclosure is an antibody specific for claudin-18 isoform 2 (“claudin-18.2”). See, e.g., WO 2013/167259. In some cases, a claudin-18.2-specific TTP is a scFv. In some cases, a claudin-18.2-specific TTP is a nanobody. In some cases, a TPP present in a TMMP of the present disclosure is an antibody specific for TEDEVQSYPSKHDYV (SEQ ID NO:246) or EVQSYPSKHDYV (SEQ ID NO:247).

[0299] As one example, an anti-claudin-18.2 antibody can comprise a VH CDR1 having the amino acid sequence GYTFTDYS (SEQ ID NO:563); a VH CDR2 having the amino acid sequence INTETGVP (SEQ ID NO:564); a VH CDR3 having the amino acid sequence ARRTGFDY (SEQ ID NO:565); a VL CDR1 having the amino acid sequence KNLLHSDGITY (SEQ ID NO:566); a VL CDR2 having the amino acid sequence RVS; and a VL CDR3 having the amino acid sequence VQVLELPFT (SEQ ID NO:567).

[0300] As another example, an anti-claudin-18.2 antibody can comprise a VH CDR1 having the amino acid sequence GFTFSSYA (SEQ ID NO:568); a VH CDR2 having the amino acid sequence ISDGGSYS (SEQ ID NO:569); a VH CDR3 having the amino acid sequence ARDSYYDNSYVRDY (SEQ ID NO:570); a VL CDR1 having the amino acid sequence QDINTF (SEQ ID NO:571); a VL CDR2 having the amino acid sequence RTN; and a VL CDR3 having the amino acid sequence LQYDEFPLT (SEQ ID NO:572).

### Single-chain T-cell Receptors

[0301] As noted above, in some cases, a TTP present in a TMMP of the present disclosure is a scTCR. A TTP can be a scTCR specific for a peptide/HLA complex on the surface of a cancer cell, where the peptide can be a cancer-associated peptide (e.g., a peptide of a cancer-associated antigen). Amino acid sequences of scTCRs specific for cancer-associated peptides bound to an HLA complex are known in the art. See, e.g., US 2019/0135914; US 2019/0062398; and US 2018/0371049.

[0302] A scTCR includes an alpha chain variable region (Vα) and a beta chain variable region (Vβ) covalently linked through a suitable peptide linker sequence. For example, the Vα can be covalently linked to the Vβ through a suitable peptide linker (L) sequence fused to the C-terminus of the Vα and the N-terminus of the VD. An scTCR can have the structure Vα-L-Vβ. An scTCR can have the structure Vβ-L-Vα. An scTCR can also comprise a constant domain (also referred to as constant region). In some cases, an scTCR comprises, in order from N-terminus to C-terminus: i) a TCR α chain variable domain polypeptide; ii) a peptide linker; iii) a TCR β chain variable domain polypeptide; and iv) a TCR β chain constant region extracellular domain polypeptide. In some cases, an scTCR comprises, in order from N-terminus to C-terminus: i) a TCR β chain variable domain polypeptide; ii) a peptide linker; iii) a TCR α chain variable domain polypeptide; and iv) a TCR α chain constant region extracellular domain polypeptide.

[0303] Amino acid sequences of scTCRs specific for peptide/HLA complexes, where the peptide is a cancer-associated peptide, are known in the art. See, e.g., US 2019/0135914; US 2019/0062398; US 2018/0371049; US 2019/0144563; and US 2019/0119350.

[0304] For example, a scTCR can be specific for an NY-ESO epitope such as an SLLMWITQC peptide bound to an HLA complex comprising an HLA-A*0201 heavy chain and a β2M polypeptide. As an example, such an scTCR can comprise: i) a TCR α chain variable region comprising an amino acid sequence having at least 90%, at least 95%, at least 98%, at least 99%, or 100%, amino acid sequence identity to the amino acid sequence:

MQEVTQIPAALSVPEGENLVLNCSFTDSAIYNLQWFRQDPGKGLTSLLLIQSSQREQTSGRLNAS LDKSSGRSTLYIAASQPGDSATYLCAVRPTSGGSYIPTFGRGTSLIVHPY (SEQ ID NO:353), where amino acid 20 can be V or A; amino acid 51 can be Q, P, S, T, or M; amino acid 52 can be S, P, F, or G, amino acid 53 can be S, W, H, or T; amino acid 94 can be P, H, or A; amino acid 95 can be T, L, M, A, Q, Y, E, I, F, V, N, G, S, D, or R; amino acid 96 can be S, L, T, Y, I, Q, V, E, A, W, R, G, H, D, or K; amino acid 97 can be G, D, N, V, S, T, or A; amino acid 98 can be G, P, H, S, T, W, or A; amino acid 99 can be S, T, Y, D, H, V, N, E, G, Q, K, A, I, or R; amino acid 100 can be Y, F, M, or D; amino acid 101 can be I, P, T, or M; and amino acid 103 can be T or A; and ii) a TCR β chain variable region comprising an amino acid sequence having at least 90%, at least 95%, at least 98%, at least 99%, or 100%, amino acid sequence identity to the amino acid sequence:

(SEQ ID NO: 354)
MGVTQTPKFQVLKTGQSMTLQCAQDMNHEYMSWYRQDPGMGLRL
IHYSVGAGITDQGEVPNGYNVSRSTTEDFPLRLLSAAPSQTSVY
FCASSYVGNTGELFFGEGSRLTVL,

where amino acid 18 can be M or V; amino acid 50 can be G, V, or I; amino acid 52 can be G or Q; amino acid 53 can be I, T, or M; amino acid 55 can be D or R; amino acid 56 can be Q or R; amino acid 70 can be T or I; amino acid 94 can be Y, N, or F; amino acid 95 can be V or L; and amino acid 97 can be N, G, or D. For example, in some cases, a scTCR can comprise: i) a TCR α chain variable region comprising the amino acid sequence:
MQEVTQIPAALSVPEGENLVLNCSFTDSAIYNLQWFRQDPGKGLTSLLLIMSHQREQTSGRLNA SLDKSSGRSTLYIAASQPGDSATYLCAVRPTSGGSYIPTFGRGTSLIVHPY (SEQ ID NO:355); and a TCR β chain variable region comprising the amino acid sequence:

(SEQ ID NO: 356)
MGVTQTPKFQVLKTGQSMTLQCAQDMNHEYMSWYRQDPGMGLRL
IHYSVSAGITDQGEVPNGYNVSRSTTEDFPLRLLSAAPSQTSVY
FCASSYVGNTGELFFGEGSRLTVL.

[0305] As another example, a scTCR can be specific for an HPV epitope (e.g., an HPV peptide of the amino acid sequence YIIFVYIPL (HPV 16 E5₆₃₋₇₁; SEQ ID NO:357), KLPQLCTEL (HPV 16 E6₁₁₋₁₉; SEQ ID NO:358), TIHEIILECV (HPV 16 E6; SEQ ID NO:359), YMLDLQPET (HPV 16 E7₁₁₋₁₉; SEQ ID NO:360), TLGIVCPI (HPV 16 E7₈₆₋₉₃) (SEQ ID NO: 361), KCIDFYSRI (HPV 18 E6₆₇₋₇₅; SEQ ID NO:362), or FQQLFLNTL (HPV 18 E7₈₆₋₉₄; SEQ ID NO:363)) bound to an HLA complex comprising an HL heavy chain and a β2M polypeptide. As an example, such an scTCR can comprise: i) a TCR α chain variable region comprising an amino acid sequence having at least 90%, at least 95%, at least 98%, at least 99%, or 100%, amino acid sequence identity to the amino acid sequence:

METLLGLLILQLQLQWVSSKQEVTQIPAALSVPEGENLVLNCSFTDSAIYNLQWFRQDPGKGLT SLLLIQSSQREQTSGRLNASLDKSSGRSTLYIAASQPGDSATYLCAVRETSGSRLTFGEGTQLTVN PD(SEQ ID NO:364); and ii) a TCR f chain variable region comprising an amino acid sequence having at least 90%, at least 95%, at least 98%, at least 99%, or 100%, amino acid sequence identity to the amino acid sequence:

(SEQ ID NO: 365)
MGIRLLCRVAFCFLAVGLVDVKVTQSSRYLVKRTGEKVFLECVQ
DMDHENMFWYRQDPGLGLRLIYFSYDVKMKEKGDIPEGYSVSRE
KKERFSLILESASTNQTSMYLCASSFWGRSTDTQYFGPGTRLTV
L.

### Contrast Agents

[0306] In some cases, the TTP of a TMMP of the present disclosure comprises a contrast agent or a radiolabel, where the contrast agent facilitates imaging of a tumor to which the TMMP binds.

[0307] Suitable agents include computed tomography (CT), a positron emission tomography (PET), and single photon emission computed tomography (SPECT) radiotracers. Suitable PET/SPECT contrast agents include, e.g., a positron emitter, for example ¹¹C, ¹³N, ¹⁸F, ⁸²Ru, and ¹⁵O. Iodinated CT contrast agents can be used. Suitable contrast agents include gadolinium (Gd), dysprosium, and iron. Gd chelates, such as Gd diethylene triamine pentaacetic acid (GdDTPA), Gd tetraazacyclododecanetetraacetic acid (GdDOTA), polylysine-Gd chelates, and derivatives thereof, can be used. Suitable radioisotopes include ¹²³I (iodine), ¹⁸F (fluorine), ⁹⁹Tc (technetium), ¹¹¹In (indium), and ⁶⁷Ga (gallium).

### Linkers

[0308] A TMMP of the present disclosure can include one or more linkers, where the one or more linkers are between one or more of: i) an MHC Class I polypeptide and an Ig Fc polypeptide, where such a linker is referred to herein as “L1”; ii) an immunomodulatory polypeptide and an MHC Class I polypeptide, where such a linker is referred to herein as “L2”; iii) a first immunomodulatory polypeptide and a second immunomodulatory polypeptide, where such a linker is referred to herein as “L3”; iv) a peptide antigen (“epitope”) and an MHC Class I polypeptide; v) an MHC Class I polypeptide and a dimerization polypeptide (e.g., a first or a second member of a dimerizing pair); vi) a dimerization polypeptide (e.g., a first or a second member of a dimerizing pair) and an IgFc polypeptide; and vii) an Ig Fc polypeptide (or non-Ig scaffold) and a tumor-targeting polypeptide.

[0309] Suitable linkers (also referred to as “spacers”) can be readily selected and can be of any of a number of suitable lengths, such as from 1 amino acid to 25 amino acids, from 3 amino acids to 20 amino acids, from 2 amino acids to 15 amino acids, from 3 amino acids to 12 amino acids, including 4 amino acids to 10 amino acids, 5 amino acids to 9 amino acids, 6 amino acids to 8 amino acids, or 7 amino acids to 8 amino acids. A suitable linker can be 1, 2, 3, 4, 5, 6, 7, 8, 9, 10, 11, 12, 13, 14, 15, 16, 17, 18, 19, 20, 21, 22, 23, 24, or 25 amino acids in length. In some cases, a linker has a length of from 25 amino acids to 50 amino acids, e.g., from 25 to 30, from 30 to 35, from 35 to 40, from 40 to 45, or from 45 to 50 amino acids in length.

[0310] Exemplary linkers include glycine polymers (G)ₙ, glycine-serine polymers (including, for example, (GS)ₙ, (GSGGS)ₙ (SEQ ID NO:366) and (GGGS)ₙ (SEQ ID NO:367), where n is an integer of at least one), glycine-alanine polymers, alanine-serine polymers, and other flexible linkers known in the art. Glycine and glycine-serine polymers can be used; both Gly and Ser are relatively unstructured, and therefore can serve as a neutral tether between components. Glycine polymers can be used; glycine accesses significantly more phi-psi space than even alanine, and is much less restricted than residues with longer side chains (see Scheraga, Rev. Computational Chem. 11173-142 (1992)). Exemplary linkers can comprise amino acid sequences including, but not limited to, GGSG (SEQ ID NO:368), GGSGG (SEQ ID NO: 369), GSGSG (SEQ ID NO:370), GSGGG (SEQ ID NO:371), GGGSG (SEQ ID NO:372), GSSSG (SEQ ID NO:373), and the like. Exemplary linkers can include, e.g., Gly(Ser₄)n (SEQ ID NO:374), where n is 1, 2, 3, 4, 5, 6, 7, 8, 9, or 10. In some cases, a linker comprises the amino acid sequence (GSSSS)n (SEQ ID NO:375), where n is 4. In some cases, a linker comprises the amino acid sequence (GSSSS)n (SEQ ID NO:376), where n is 5. In some cases, a linker comprises the amino acid sequence (GGGGS)n (SEQ ID NO:377), where n is 1. In some cases, a linker comprises the amino acid sequence (GGGGS)n (SEQ ID NO:378), where n is 2. In some cases, a linker comprises the amino acid sequence (GGGGS)n (SEQ ID NO:379), where n is 3. In some cases, a linker comprises the amino acid sequence (GGGGS)n (SEQ ID NO:380), where n is 4. In some cases, a linker comprises the amino acid sequence (GGGGS)n (SEQ ID NO:381), where n is 5. In some cases, a linker comprises the amino acid sequence (GGGGS)n (SEQ ID NO:382), where n is 6. In some cases, a linker comprises the amino acid sequence (GGGGS)n (SEQ ID NO:383), where n is 7, In some cases, a linker comprises the amino acid sequence (GGGGS)n (SEQ ID NO:384), where n is 8, In some cases, a linker comprises the amino acid sequence (GGGGS)n (SEQ ID NO:385), where n is 9, In some cases, a linker comprises the amino acid sequence (GGGGS)n (SEQ ID NO:386), where n is 10. In some cases, a linker comprises the amino acid sequence AAAGG (SEQ ID NO:387).

[0311] In some cases, a linker polypeptide, present in a first polypeptide of a TMMP of the present disclosure, includes a cysteine residue that can form a disulfide bond with a cysteine residue present in a second polypeptide of a TMMP of the present disclosure. In some cases, for example, a suitable linker comprises the amino acid sequence GCGGSGGGGSGGGGS (SEQ ID NO:388). As another example, a suitable linker can comprise the amino acid sequence GCGGS(G4S)n (SEQ ID NO:389), where n is 1, 2, 3, 4, 5, 6, 7, 8, or 9. For example, in some cases, the linker comprises the amino acid sequence GCGGSGGGGSGGGGSGGGGS (SEQ ID NO:390). As another example, the linker comprises the amino acid sequence GCGGSGGGGSGGGGS (SEQ ID NO:391).

### Epitones

[0312] A TMMP of the present disclosure comprises any of a variety of peptide epitopes. As discussed above, a peptide epitope present in a TMMP of the present disclosure is a peptide that, when complexed with MHC polypeptides, presents an epitope to a T-cell receptor (TCR). An epitope-specific T cell binds an epitope having a given amino acid sequence, i.e., a “reference” amino acid sequence, but does not substantially bind an epitope that differs from the reference amino acid sequence. For example, an epitope-specific T cell binds an epitope that differs from the reference amino acid sequence, if at all, with an affinity that is less than 10⁻⁶ M, less than 10⁻⁵ M, or less than 10⁻⁴ M. An epitope-specific T cell can bind an epitope having a reference amino acid sequence, i.e., for which it is specific, with an affinity of at least 10⁻⁷ M, at least 10⁻⁸ M, at least 10⁻⁹ M, or at least 10⁻¹⁰ M.

[0313] The epitopes of peptide epitopes within the scope of this disclosure include, but are not limited to, epitopes present in cancer-associated antigens, viral epitopes (e.g., epitopes present in a viral antigen), etc. Cancer-associated antigens are known in the art; see, e.g., Cheever et al. (2009) Clin. Cancer Res. 15:5323. Cancer-associated antigens include, but are not limited to, α-folate receptor; carbonic anhydrase IX (CAIX); CD19; CD20; CD22; CD30; CD33; CD44v7/8; carcinoembryonic antigen (CEA); epithelial glycoprotein-2 (EGP-2); epithelial glycoprotein-40 (EGP-40); folate binding protein (FBP); fetal acetylcholine receptor; ganglioside antigen GD2; Her2/neu; IL-13R-a2; kappa light chain; LeY; L1 cell adhesion molecule; melanoma-associated antigen (MAGE); MAGE-A1; mesothelin; MUC1; NKG2D ligands; oncofetal antigen (h5T4); prostate stem cell antigen (PSCA); prostate-specific membrane antigen (PSMA); tumor-associate glycoprotein-72 (TAG-72); vascular endothelial growth factor receptor-2 (VEGF-R2). See, e.g., Vigneron et al. (2013) Cancer Immunity 13:15; and Vigneron (2015) BioMed Res. Int'l Article ID 948501; and epidermal growth factor receptor (EGFR) vIII polypeptide (see, e.g., Wong et al. (1992) Proc. Natd. Acad. Sci. USA 89:2965; and Miao et al. (2014) PLoSOne 9:e94281).

[0314] In some cases, a suitable peptide epitope presents an epitope of a MUC1 polypeptide, an LMP2 polypeptide, an epidermal growth factor receptor (EGFR) vIII polypeptide, a HER-2/neu polypeptide, a melanoma antigen family A, 3 (MAGE A3) polypeptide, a p53 polypeptide, a mutant p53 polypeptide, an NY-ESO-1 polypeptide, a folate hydrolase (prostate-specific membrane antigen; PSMA) polypeptide, a carcinoembryonic antigen (CEA) polypeptide, a melanoma antigen recognized by T-cells (melanA/MART1) polypeptide, a Ras polypeptide, a gp100 polypeptide, a proteinase3 (PR1) polypeptide, a bcr-abl polypeptide, a tyrosinase polypeptide, a survivin polypeptide, a prostate specific antigen (PSA) polypeptide, an hTERT polypeptide, a sarcoma translocation breakpoints polypeptide, a synovial sarcoma X (SSX) breakpoint polypeptide, an EphA2 polypeptide, an acid phosphatase, prostate (PAP) polypeptide, a melanoma inhibitor of apoptosis (ML-IAP) polypeptide, an epithelial cell adhesion molecule (EpCAM) polypeptide, an ERG (TMPRSS2 ETS fusion) polypeptide, a NA17 polypeptide, a paired-box-3 (PAX3) polypeptide, an anaplastic lymphoma kinase (ALK) polypeptide, an androgen receptor polypeptide, a cyclin B1 polypeptide, an N-myc proto-oncogene (MYCN) polypeptide, a Ras homolog gene family member C (RhoC) polypeptide, a tyrosinase-related protein-2 (TRP-2) polypeptide, a mesothelin polypeptide, a prostate stem cell antigen (PSCA) polypeptide, a melanoma associated antigen-1 (MAGE A1) polypeptide, a cytochrome P450 1B1 (CYPIB1) polypeptide, a placenta-specific protein 1 (PLAC1) polypeptide, a BORIS polypeptide (also known as CCCTC-binding factor or CTCF), an ETV6-AML polypeptide, a breast cancer antigen NY-BR-1 polypeptide (also referred to as ankyrin repeat domain-containing protein 30A), a regulator of G-protein signaling (RGS5) polypeptide, a squamous cell carcinoma antigen recognized by T-cells (SART3) polypeptide, a carbonic anhydrase IX polypeptide, a paired box-5 (PAX5) polypeptide, an OY-TES1 (testis antigen; also known as acrosin binding protein) polypeptide, a sperm protein 17 polypeptide, a lymphocyte cell-specific protein-tyrosine kinase (LCK) polypeptide, a high molecular weight melanoma associated antigen (HMW-MAA), an A-kinase anchoring protein-4 (AKAP-4), a synovial sarcoma X breakpoint 2 (SSX2) polypeptide, an X antigen family member 1 (XAGE1) polypeptide, a B7 homolog 3 (B7H3; also known as CD276) polypeptide, a legumain polypeptide (LGMN1; also known as asparaginyl endopeptidase), a tyrosine kinase with Ig and EGF homology domains-2 (Tie-2; also known as angiopoietin-1 receptor) polypeptide, a P antigen family member 4 (PAGE4) polypeptide, a vascular endothelial growth factor receptor 2 (VEGF2) polypeptide, a MAD-CT-1 polypeptide, a fibroblast activation protein (FAP) polypeptide, a platelet derived growth factor receptor beta (PDGFO) polypeptide, a MAD-CT-2 polypeptide, or a Fos-related antigen-1 (FOSL) polypeptide. In some cases, a human papilloma virus (HPV) antigen is specifically excluded. In some cases, an alpha-feto protein (AFP) antigen is specifically excluded. In some cases, a Wilms tumor-1 (WT1) antigen is specifically excluded.

[0315] Amino acid sequences of cancer-associated antigens are known in the art; see, e.g., MUC1 (GenBank CAA56734); LMP2 (GenBank CAA47024); EGFRvIII (GenBank NP_001333870); HER-2/neu (GenBank AAI67147); MAGE-A3 (GenBank AAH11744); p53 (GenBank BAC16799); NY-ESO-1 (GenBank CAA05908); PSMA (GenBank AAH25672); CEA (GenBank AAA51967); melan/MART1 (GenBank NP_005502); Ras (GenBank NP_001123914); gp100 (GenBank AAC60634); bcr-abl (GenBank AAB60388); tyrosinase (GenBank AAB60319); survivin (GenBank AAC51660); PSA (GenBank CAD54617); hTERT (GenBank BAC11010); SSX (GenBank NP_001265620); Eph2A (GenBank NP_004422); PAP (GenBank AAH16344); ML-IAP (GenBank AAH14475); EpCAM (GenBank NP_002345); ERG (TMPRSS2 ETS fusion) (GenBank ACA81385); PAX3 (GenBank AAI01301); ALK (GenBank NP_004295); androgen receptor (GenBank NP_000035); cyclin B1 (GenBank CA099273); MYCN (GenBank NP_001280157); RhoC (GenBank AAH52808); TRP-2 (GenBank AAC60627); mesothelin (GenBank AAH09272); PSCA (GenBank AAH65183); MAGE A1 (GenBank NP_004979); CYP1B1 (GenBank AAM50512); PLAC1 (GenBank AAG22596); BORIS (GenBank NP_001255969); ETV6 (GenBank NP_001978); NY-BR1 (GenBank NP_443723); SART3 (GenBank NP_055521); carbonic anhydrase IX (GenBank EAW58359); PAX5 (GenBank NP_057953); OY-TES1 (GenBank NP_115878); sperm protein 17 (GenBank AAK20878); LCK (GenBank NP_001036236); HMW-MAA (GenBank NP_001888); AKAP-4 (GenBank NP_003877); SSX2 (GenBank CAA60111); XAGE1 (GenBank NP_001091073; XP_001125834; XP_001125856; and XP_001125872); B7H3 (GenBank NP_001019907; XP_947368; XP_950958; XP_950960; XP_950962; XP_950963; XP_950965; and XP_950967); LGMN1 (GenBank NP_001008530); TIE-2 (GenBank NP_000450); PAGE4 (GenBank NP_001305806); VEGFR2 (GenBank NP_002244); MAD-CT-1 (GenBank NP_005893 NP_056215); FAP (GenBank NP_004451); PDGFβ (GenBank NP_002600); MAD-CT-2 (GenBank NP_001138574); and FOSL (GenBank NP_005429). These polypeptides are also discussed in, e.g., Cheever et al. (2009) Clin. Cancer Res. 15:5323, and references cited therein; Wagner et al. (2003) J. Cell. Sci. 116:1653; Matsui et al. (1990) Oncogene 5:249; Zhang et al. (1996) Nature 383:168.

[0316] Suitable epitopes include, but are not limited to, epitopes present in an infectious disease agent, e.g., an epitope presented by a virus-encoded polypeptide. Examples of viral infectious disease agents include, e.g., Adenoviruses, Adeno-associated virus, Alphaviruses (Togaviruses), Eastern equine encephalitis virus, Eastern equine encephalomyelitis virus, Venezuelan equine encephalomyelitis vaccine strain TC-83, Western equine encephalomyelitis virus, Arenaviruses, Lymphocytic choriomeningitis virus (non-neurotropic strains), Tacaribe virus complex, Bunyaviruses, Bunyamwera virus, Rift Valley fever virus vaccine strain MP-12, Chikungunya virus, Calciviruses, Coronaviruses, Cowpox virus, Flaviviruses (Togaviruses)-Group B Arboviruses, Dengue virus serotypes 1, 2, 3, and 4, Yellow fever virus vaccine strain 17D, Hepatitis A, B, C, D, and E viruses, the Cytomegalovirus, Epstein Barr virus, Eastern Equine encephalitis virus, Herpes simplex types 1 and 2, Herpes zoster, Human herpesvirus types 6 and 7, hepatitis C virus (HVC), hepatitis B virus (HBV), Influenza viruses types A, B, and C, Papovaviruses, Newcastle disease virus, Measles virus, Mumps virus, Parainfluenza viruses types 1, 2, 3, and 4, polyomaviruses (JC virus, BK virus), Respiratory syncytial virus, Human parvovirus (B 19), Coxsackie viruses types A and B, Echoviruses, Polioviruses, Rhinoviruses, Alastrim (Variola minor virus), Smallpox (Variola major virus), Whitepox Reoviruses, Coltivirus, human Rotavirus, and Orbivirus (Colorado tick fever virus), Rabies virus, Vesicular stomatitis virus, Rubivirus (rubella), Semliki Forest virus, St. Louis encephalitis virus, Venezuelan equine encephalitis virus, Venezuelan equine encephalomyelitis virus, Arenaviruses (a.k.a. South American Hemorrhagic Fever virus), Flexal, Lymphocytic choriomeningitis virus (LCM) (neurotropic strains), Hantaviruses including Hantaan virus, Rift Valley fever virus, Japanese encephalitis virus, Yellow fever virus, Monkeypox virus, Human immunodeficiency virus (HIV) types 1 and 2, Human T cell lymphotropic virus (HTLV) types 1 and 2, Simian immunodeficiency virus (SIV), Vesicular stomatitis virus, Guanarito virus, Lassa fever virus, Junin virus, Machupo virus, Sabia, Crimean-Congo hemorrhagic fever virus, Ebola viruses, Marburg virus, Tick-borne encephalitis virus complex (flavi) including Central European tick-borne encephalitis, Far Eastern tick-borne encephalitis, Hanzalova, Hypr, Kumlinge, Kyasanur Forest disease, Omsk hemorrhagic fever, and Russian Spring Summer encephalitis viruses,Herpesvirus simiae (Herpes B or Monkey B virus), Cercopithecine herpesvirus 1 (Herpes B virus), Equine morbillivirus (Hendra and Hendra-like viruses), Nipah virus, Variola major virus (Smallpox virus), Variola minor virus (Alastrim), African swine fever virus, African horse sickness virus, Akabane virus, Avian influenza virus (highly pathogenic), Blue tongue virus, Camel pox virus, Classical swine fever virus, Cowdria ruminantium (heartwater), Foot and mouth disease virus, Goat pox virus, Japanese encephalitis virus, Lumpy skin disease virus, Malignant catarrhal fever virus, Menangle virus, Newcastle disease virus (VVND), Vesicular stomatitis virus (exotic), and Zika virus. Antigens encoded by such viruses are known in the art; a peptide epitope suitable for use in a TMMP of the present disclosure can include a peptide from any known viral antigen. In some cases, an HPV antigen is specifically excluded. In some cases, an HBV antigen is specifically excluded. In some cases, a viral epitope is an epitope present in a viral antigen encoded by a virus that infects a majority of the human population, where such viruses include, e.g., cytomegalovirus (CMV), Epstein-Barr virus (EBV), human papilloma virus, adenovirus, and the like.

[0317] In some cases, the epitope peptide present in a TMMP of the present disclosure presents an epitope specific to an HLA-A, —B, —C, -E, —F, or -G allele. In an embodiment, the epitope peptide present in a TMMP presents an epitope restricted to HLA-A*0101, A*0201, A*0301, A*1101, A*2301, A*2402, A*2407, A*3303, and/or A*3401. In an embodiment, the epitope peptide present in a TMMP presents an epitope restricted to HLA-B*0702, B*0801, B*1502, B*3802, B*4001, B*4601, and/or B*5301. In an embodiment, the epitope peptide present in a TMMP presents an epitope restricted to C*0102, C*0303, C*0304, C*0401, C*0602, C*0701, C*702, C*0801, and/or C*1502.

### CMV Peptide Epitopes

[0318] In some cases, a TMMP of the present disclosure comprises a CMV peptide epitope, i.e., a peptide that when in an MHC/peptide complex (e.g., an HLA/peptide complex), presents a CMV epitope (i.e., an epitope present in a CMV antigen) to a T cell. As with other peptide epitopes of this disclosure, a CMV peptide epitope has a length of at least 4 amino acids, e.g., from 4 amino acids to about 25 amino acids (e.g., 4 amino acids (aa), 5 aa, 6 aa, 7 aa, 8 aa, 9 aa, 10 aa, 11 aa, 12 aa, 13 aa, 14 aa, 15 aa, 16 aa, 17 aa, 18 aa, 19 aa, 20 aa, 21 aa, 22 aa, 23 aa, 24 aa, or 25 aa, including within a range of from 4 to 20 aa., from 6 to 18 aa., from 8 to 15 aa, from 8 to 12 aa., from 5 to 10 aa., from 10 to 15 aa., from 15 to 20 aa., from 10 to 20 aa., or from 15 to 25 aa, in length).

[0319] A given CMV epitope-specific T cell binds an epitope having a reference amino acid sequence of a given CMV epitope, but does not substantially bind an epitope that differs from the reference amino acid sequence. For example, a given CMV epitope-specific T cell binds a CMV epitope having a reference amino acid sequence, and binds an epitope that differs from the reference amino acid sequence, if at all, with an affinity that is less than 10⁻⁶ M, less than 10⁻⁵ M, or less than 10⁻⁴ M. A given CMV epitope-specific T cell can bind an epitope for which it is specific with an affinity of at least 10⁻⁷ M, at least 10⁻⁸ M, at least 10⁻⁹ M, or at least 10⁻¹⁰ M.

[0320] In some cases, a CMV peptide epitope present in a TMMP of the present disclosure is a peptide from CMV pp65. In some cases, a CMV peptide epitope present in a TMMP of the present disclosure is a peptide from CMV gB (glycoprotein B).

[0321] For example, in some cases, a CMV peptide epitope present in a TMMP of the present disclosure is a peptide of a CMV polypeptide having a length of at least 4 amino acids, e.g., from 4 amino acids to about 25 amino acids (e.g., 4 amino acids (aa), 5 aa, 6 aa, 7 aa, 8 aa, 9 aa, 10 aa, 11 aa, 12 aa, 13 aa, 14 aa, 15 aa, 16 aa, 17 aa, 18 aa, 19 aa, 20 aa, 21 aa, 22 aa, 23 aa, 24 aa, or 25 aa, including within a range of from 4 to 20 aa., from 6 to 18 aa., from 8 to 15 aa, from 8 to 12 aa., from 5 to 10 aa., from 10 to 15 aa., from 15 to 20 aa., from 10 to 20 aa., or from 15 to 25 aa, in length), and comprising an amino acid sequence having at least 80%, at least 85%, at least 90%, at least 95%, at least 98%, at least 99%, or 100%, amino acid sequence identity to the following CMV pp65 amino acid sequence:

(SEQ ID NO: 392)
MESRGRRCPE MISVLGPISG HVLKAVFSRG DTPVLPHETR
LLQTGIHVRV SQPSLILVSQ YTPDSTPCHR GDNQLQVQHT
YFTGSEVENV SVNVHNPTGR SICPSQEPMS IYVYALPLKM
LNIPSINVHH YPSAAERKHR HLPVADAVIH ASGKQMWQAR
LTVSGLAWTR QQNQWKEPDV YYTSAFVFPT KDVALRHVVC
AHELVCSMEN TRATKMQVIG DQYVKVYLES FCEDVPSGKL
FMHVTLGSDV EEDLTMTRNP QPFMRPHERN GFTVLCPKNM
IIKPGKISHI MLDVAFTSHE HFGLLCPKSI PGLSISGNLL
MNGQQIFLEV QAIRETVELR QYDPVAALFF FDIDLLLQRG
PQYSEHPTFT SQYRIQGKLE YRHTWDRHDE GAAQGDDDVW
TSGSDSDEEL VTTERKTPRV TGGGAMAGAS TSAGRKRKSA
SSATACTSGV MTRGRLKAES TVAPEEDTDE DSDNEIHNPA
VFTWPPWQAG ILARNLVPMV ATVQGQNLKY QEFFWDANDI
YRIFAELEGV WQPAAQPKRR RHRQDALPGP CIASTPKKHR
G.

[0322] As one non-limiting example, a CMV peptide epitope present in a TMMP of the present disclosure has the amino acid sequence NLVPMVATV (SEQ ID NO:393) and has a length of 9 amino acids.

[0323] In some cases, a CMV peptide epitope present in a TMMP of the present disclosure is a peptide having a length of at least 4 amino acids, e.g., from 4 amino acids to about 25 amino acids (e.g., 4 amino acids (aa), 5 aa, 6 aa, 7 aa, 8 aa, 9 aa, 10 aa, 11 aa, 12 aa, 13 aa, 14 aa, 15 aa, 16 aa, 17 aa, 18 aa, 19 aa, 20 aa, 21 aa, 22 aa, 23 aa, 24 aa, or 25 aa, including within a range of from 4 to 20 aa., from 6 to 18 aa., from 8 to 15 aa, from 8 to 12 aa., from 5 to 10 aa., from 10 to 15 aa., from 15 to 20 aa., from 10 to 20 aa., or from 15 to 25 aa, in length) of a CMV polypeptide comprising an amino acid sequence having at least 80%, at least 85%, at least 90%, at least 95%, at least 98%, at least 99%, or 100%, amino acid sequence identity to the following CMV gB amino acid sequence:

(SEQ ID NO: 394)
MESRIWCLVVCVNLCIVCLGAAVSSSSTSHATSSTHNGSHTSR
TTSAQTRSVYSQHVTSSEAVSHRANETIYNTTLKYGDVVGVNT
TKYPYRVCSMAQGTDLIRFERNIICTSMKPINEDLDEGIMVVY
KRNIVAHTFKVRVYQKVLTFRRSYAYIYTTYLLGSNTEYVAPP
MWEIHHINKFAQCYSSYSRVIGGTVFVAYHRDSYENKTMQLIP
DDYSNTHSTRYVTVKDQWHSRGSTWLYRETCNLNCMLTITTAR
SKYPYHFFATSTGDVVYISPFYNGTNRNASYFGENADKFFIFP
NYTIVSDFGRPNAAPETHRLVAFLERADSVISWDIQDEKNVTC
QLTFWEASERTIRSEAEDSYHFSSAKMTATFLSKKQEVNMSDS
ALDCVRDEAINKLQQIFNTSYNQTYEKYGNVSVFETSGGLVVF
WQGIKQKSLVELERLANRSSLNITHRTRRSTSDNNTTHLSSME
SVHNLVYAQLQFTYDTLRGYINRALAQIAEAWCVDQRRTLEVF
KELSKINPSAILSAIYNKPIAARFMGDVLGLASCVTINQTSVK
VLRDMNVKESPGRCYSRPVVIFNFANSSYVQYGQLGEDNEILL
GNHRTEECQLPSLKIFIAGNSAYEYVDYLFKRMIDLSSISTVD
SMIALDIDPLENTDFRVLELYSQKELRSSNVFDLEEIMREFNS
YKQRVKYVEDKVVDPLPPYLKGLDDLMSGLGAAGKAVGVAIGA
VGGAVASVVEGVATFLKNPFGAFTIILVAIAVVIITYLIYTRQ
RRLCTQPLQNLFPYLVSADGTTVTSGSTKDTSLQAPPSYEESV
YNSGRKGPGPPSSDASTAAPPYTNEQAYQMLLALARLDAEQRA
QQNGTDSLDGQTGTQDKGQKPNLLDRLRHRKNGYRHLKDSDEE
ENV.

[0324] In some cases, the CMV epitope present in a TMMP of the present disclosure presents an epitope specific to an HLA-A, —B, —C, -E, —F, or -G allele. In some cases, the epitope peptide present in a TMMP presents an epitope restricted to HLA-A*0101, A*0201, A*0301, A*1101, A*2301, A*2402, A*2407, A*3303, and/or A*3401. In some cases, the CMV epitope present in a TMMP of the present disclosure presents an epitope restricted to HLA-B*0702, B*0801, B*1502, B*3802, B*4001, B*4601, and/or B*5301. In some cases, the CMV epitope present in a TMMP of the present disclosure presents an epitope restricted to C*0102, C*0303, C*0304, C*0401, C*0602, C*0701, C*702, C*0801, and/or C*1502. As one example, in some cases, a TMMP of the present disclosure comprises: a) a CMV peptide epitope having amino acid sequence NLVPMVATV (SEQ ID NO:395) and having a length of 9 amino acids; b) an HLA-A*0201 class I heavy chain polypeptide; and c) a β2M polypeptide.

[0325] In some cases, a TMMP of the present disclosure comprises, as the TTP, a scFv or a nanobody specific for a Her2 polypeptide present on the surface of a cancer cell; and comprises, as the epitope a CMV peptide eitope. In some cases, the CMV peptide is a peptide of a CMV pp65 polypeptide. In some cases, the CMV peptide epitope is a peptide of a CMV gB polypeptide. In some cases, the CMV peptide epitope has the amino acid sequence NLVPMVATV (SEQ ID NO:395) and has a length of 9 amino acids.

[0326] In some cases, a TMMP of the present disclosure comprises, as the TTP, a scFv or a nanobody specific for a MUC1 polypeptide present on the surface of a cancer cell; and comprises, as the epitope a CMV peptide epitope. In some cases, the CMV peptide epitope is a peptide of a CMV pp65 polypeptide. In some cases, the CMV peptide is a peptide of a CMV gB polypeptide. In some cases, the CMV peptide has the amino acid sequence NLVPMVATV (SEQ ID NO:395) and has a length of 9 amino acids.

[0327] In some cases, a TMMP of the present disclosure comprises, as the TTP, a scFv or a nanobody specific for a WT1 polypeptide present on the surface of a cancer cell; and comprises, as the epitope a CMV peptide epitope. In some cases, the CMV peptide epitope is a peptide of a CMV pp65 polypeptide. In some cases, the CMV peptide epitope is a peptide of a CMV gB polypeptide. In some cases, the CMV peptide epitope has the amino acid sequence NLVPMVATV (SEQ ID NO:395) and has a length of 9 amino acids.

[0328] In some cases, a TMMP of the present disclosure comprises, as the TTP, a scFv or a nanobody specific for a mesothelin polypeptide present on the surface of a cancer cell; and comprises, as the epitope a CMV peptide epitope. In some cases, the CMV peptide epitope is a peptide of a CMV pp65 polypeptide. In some cases, the CMV peptide epitope is a peptide of a CMV gB polypeptide. In some cases, the CMV peptide epitope has the amino acid sequence NLVPMVATV (SEQ ID NO:395) and has a length of 9 amino acids.

[0329] In some cases, a TMMP of the present disclosure comprises, as the TTP, a scFv or a nanobody specific for a CD19 polypeptide present on the surface of a cancer cell; and comprises, as the epitope a CMV peptide epitope. In some cases, the CMV peptide epitope is a peptide of a CMV pp65 polypeptide. In some cases, the CMV peptide epitope is a peptide of a CMV gB polypeptide. In some cases, the CMV peptide epitope has the amino acid sequence NLVPMVATV (SEQ ID NO:395) and has a length of 9 amino acids.

[0330] In some cases, a TMMP of the present disclosure comprises, as the TTP, a scFv or a nanobody specific for a BCMA polypeptide present on the surface of a cancer cell; and comprises, as the epitope a CMV peptide epitope. In some cases, the CMV peptide epitopeis a peptide of a CMV pp65 polypeptide. In some cases, the CMV peptide epitope is a peptide of a CMV gB polypeptide. In some cases, the CMV peptide epitope has the amino acid sequence NLVPMVATV (SEQ ID NO:395) and has a length of 9 amino acids.

[0331] In some cases, a TMMP of the present disclosure comprises, as the TTP, a scFv or a nanobody specific for a MUC16 polypeptide present on the surface of a cancer cell; and comprises, as the epitope a CMV peptide epitope. In some cases, the CMV peptide epitope is a peptide of a CMV pp65 polypeptide. In some cases, the CMV peptide epitope is a peptide of a CMV gB polypeptide. In some cases, the CMV peptide epitope has the amino acid sequence NLVPMVATV (SEQ ID NO:395) and has a length of 9 amino acids.

### HLA/Peptide Binding Assays

[0332] Whether a given peptide (e.g., a peptide that comprises an epitope) binds a class I HLA (comprising an HLA heavy chain and a β2M polypeptide), and, when bound to the HLA complex, can effectively present an epitope to a TCR, can be determined using any of a number of well-known methods. Assays include binding assays and T-cell activation assays.

### Cell-Based Binding Assay

[0333] As one example, a cell-based peptide-induced stabilization assay can be used to determine peptide-HLA class I binding. In this assay, a peptide of interest is allowed to bind to a TAP-deficient cell, i.e., a cell that has defective transporter associated with antigen processing (TAP) machinery, and consequently, few surface class I molecules. Such cells include, e.g., the human T2 cell line (T2 (174×CEM.T2; American Type Culture Collection (ATCC) No. CRL-1992). Henderson et al. (1992) Science 255:1264. Without efficient TAP-mediated transport of cytosolic peptides into the endoplasmic reticulum, assembled class I complexes are structurally unstable, and retained only transiently at the cell surface. However, when T2 cells are incubated with an exogenous peptide capable of binding class I, surface peptide-HLA class I complexes are stabilized and can be detected by flow cytometry with, e.g., a pan anti-class I monoclonal antibody. The stabilization and resultant increased life-span of peptide-HLA complexes on the cell surface by the addition of a peptide validates their identity. Analysis can be carried out using flow cytometry, e.g., where the pan-HLA class I antibody comprises a fluorescent label. Binding of the peptide to various allelic forms of HLA H chains can be tested by genetically modifying the T2 cells to express an allelic HLA H chain of interest.

[0334] The following is a non-limiting example of use of a T2 assay to assess peptide binding to HLA A*0201. T2 cells are washed in cell culture medium, and concentrated to 10⁶ cells/ml. Peptides of interest are prepared in cell culture medium and serially diluted providing concentrations of 200 μM, 100 μM, 20 μM and 2 μM. The cells are mixed 1:1 with each peptide dilution to give a final volume of 200 μL and final peptide concentrations of 100 μM, 50 μM, 10 μM and 1 μM. A HLA A*0201 binding peptide, GILGFVFTL (SEQ ID NO:396), and a non-HLA A*0201-restricted peptide, HPVGEADYF (SEQ ID NO:397) (HLA-B*3501), are included as positive and negative controls, respectively. The cell/peptide mixtures are kept at 37° C. 5% CO₂ for ten minutes; then incubated at room temperature overnight. Cells are then incubated for 2 hours at 37° C. and stained with a fluorescently-labeled anti-human HLA antibody. The cells are washed twice with phosphate-buffered saline and analyzed using flow cytometry. The average mean fluorescence intensity (MFI) of the anti-HLA antibody staining is used to measure the strength of binding.

### Biochemical Binding Assay

[0335] HLA polypeptides (HLA heavy chain polypeptide complexed with β2M polypeptide) can be tested for binding to a peptide of interest in a cell-free in vitro assay system. For example, a labeled reference peptide (e.g., fluorescently labeled) is allowed to bind to HLA polypeptides (HLA heavy chain polypeptide complexed with β2M polypeptide), to form an HLA-reference peptide complex. The ability of a test peptide of interest to displace the labeled reference peptide from the HLA-reference peptide complex is tested. The relative binding affinity is calculated as the amount of test peptide needed to displace the bound reference peptide. See, e.g., van der Burg et al. (1995) Human Immunol. 44:189.

[0336] As another example, a peptide of interest can be incubated with an HLA molecule (HLA heavy chain complexed with a β2M polypeptide), and the stabilization of the HLA/peptide complex can be measured in an immunoassay format. The ability of a peptide of interest to stabilize an HLA molecule is compared to that of a control peptide presenting a known T-cell epitope. Detection of stabilization is based on the presence or absence of the native conformation of the HLA/peptide complex, detected using an anti-HLA antibody. See, e.g., Westrop et al. (2009) J. Immunol. Methods 341:76; Steinitz et al. (2012) Blood 119:4073; and U.S. Pat. No. 9,205,144.

### T-Cell Activation Assays

[0337] Whether a given peptide binds a class I HLA (comprising an HLA heavy chain and a β2M polypeptide), and, when bound to the HLA complex, can effectively present an epitope to a TCR, can be determined by assessing T-cell response to the peptide-HLA complex. T-cell responses that can be measured include, e.g., interferon-gamma (IFNγ) production, cytotoxic activity, and the like.

### ELISPOT Assay

[0338] Suitable assays include, e.g., an enzyme linked immunospot (ELISPOT) assay. In this assay, production of IFNγ by CD8⁺ T cells is measured following with an antigen-presenting cell (APC) that presents a peptide of interest complexed with HLA class I. Antibody to IFNγ is immobilized on wells of a multi-well plate. APCs are added to the wells, and incubated for a period of time with a peptide of interest, such that the peptide binds HLA class I on the surface of the APCs. CD8⁺ T cells specific for the peptide are added to the wells, and the plate is incubated for about 24 hours. The wells are then washed, and any IFNγ bound to the immobilized anti-IFNγ antibody is detected using a detectably labeled anti-IFNγ antibody. A colorimetric assay can be used. For example, the detectably labeled anti-IFNγ antibody can be a biotin-labeled anti-IFNγ antibody, which can be detected using, e.g., streptavidin conjugated to alkaline phosphatase. A BCIP/NBT (5-bromo-4-chloro-3-indolyl phosphate/nitro blue tetrazolium) solution is added, to develop the assay. The presence of IFNγ-secreting T cells is identified by colored spots. Negative controls include APCs not contacted with the peptide. APCs expressing various HLA H chain alleles can be used to determine whether a peptide of interest effectively binds to a HLA class I molecule comprising a particular HLA H chain.

### Cytotoxicity Assays

[0339] Whether a given peptide binds to a particular HLA class I H chain and, when bound to a HLA class I complex comprising the H chain, can effectively present an epitope to a TCR, can also be determined using a cytotoxicity assay. A cytotoxicity assay involves incubation of a target cell with a cytotoxic CD8⁺ T cell. The target cell displays on its surface a peptide/HLA class I complex comprising a peptide of interest and an HLA class I molecule comprising an HLA H chain to be tested. The target cells can be radioactively labeled, e.g., with ⁵¹Cr. Whether the target cell effectively presents an epitope to a TCR on the cytotoxic CD8⁺ T cell, thereby inducing cytotoxic activity by the CD8⁺ T cell toward the target cell, is determined by measuring release of ⁵¹Cr from the lysed target cell. Specific cytotoxicity can be calculated as the amount of cytotoxic activity in the presence of the peptide minus the amount of cytotoxic activity in the absence of the peptide.

Detection of Antigen-Specific T Cells with Peptide-HLA Tetramers

[0340] As another example, multimers (e.g., tetramers) of peptide-HLA complexes are generated with fluorescent or heavy metal tags. The multimers can then be used to identify and quantify specific T cells via flow cytometry (FACS) or mass cytometry (CyTOF). Detection of epitope-specific T cells provides direct evidence that the peptide-bound HLA molecule is capable of binding to a specific TCR on a subset of antigen-specific T cells. See, e.g., Klenerman et al. (2002) Nature Reviews Immunol. 2:263.

### Immunomodulatory Polypeptides

[0341] In some cases, an immunomodulatory polypeptide present in a TMMP of the present disclosure is a wild-type immunomodulatory polypeptide. In other cases, an immunomodulatory polypeptide present in a TMMP of the present disclosure is a variant immunomodulatory polypeptide that has reduced affinity for a co-immunomodulatory polypeptide, compared to the affinity of a corresponding wild-type immunomodulatory polypeptide for the co-immunomodulatory polypeptide. Suitable immunomodulatory domains that exhibit reduced affinity for a co-immunomodulatory domain can have from 1 amino acid (aa) to 20 aa differences from a wild-type immunomodulatory domain. For example, in some cases, a variant immunomodulatory polypeptide present in a TMMP of the present disclosure differs in amino acid sequence by 1 aa, 2 aa, 3 aa, 4 aa, 5 aa, 6 aa, 7 aa, 8 aa, 9 aa, or 10 aa, from a corresponding wild-type immunomodulatory polypeptide. As another example, in some cases, a variant immunomodulatory polypeptide present in a TMMP of the present disclosure differs in amino acid sequence by 11 aa, 12 aa, 13 aa, 14 aa, 15 aa, 16 aa, 17 aa, 18 aa, 19 aa, or 20 aa, from a corresponding wild-type immunomodulatory polypeptide. As an example, in some cases, a variant immunomodulatory polypeptide present in a TMMP of the present disclosure includes 1, 2, 3, 4, 5, 6, 7, 8, 9, or 10 amino acid substitutions, compared to a corresponding reference (e.g., wild-type) immunomodulatory polypeptide. In some cases, variant immunomodulatory polypeptide present in a TMMP of the present disclosure includes a single amino acid substitution compared to a corresponding reference (e.g., wild-type) immunomodulatory polypeptide. In some cases, variant immunomodulatory polypeptide present in a TMMP of the present disclosure includes 2 amino acid substitutions (e.g., no more than 2 amino acid substitutions) compared to a corresponding reference (e.g., wild-type) immunomodulatory polypeptide. In some cases, variant immunomodulatory polypeptide present in a TMMP of the present disclosure includes 3 amino acid substitutions (e.g., no more than 3 amino acid substitutions) compared to a corresponding reference (e.g., wild-type) immunomodulatory polypeptide. In some cases, variant immunomodulatory polypeptide present in a TMMP of the present disclosure includes 4 amino acid substitutions (e.g., no more than 4 amino acid substitutions) compared to a corresponding reference (e.g., wild-type) immunomodulatory polypeptide. In some cases, variant immunomodulatory polypeptide present in a TMMP of the present disclosure includes 5 amino acid substitutions (e.g., no more than 5 amino acid substitutions) compared to a corresponding reference (e.g., wild-type) immunomodulatory polypeptide. In some cases, variant immunomodulatory polypeptide present in a TMMP of the present disclosure includes 6 amino acid substitutions (e.g., no more than 6 amino acid substitutions) compared to a corresponding reference (e.g., wild-type) immunomodulatory polypeptide. In some cases, variant immunomodulatory polypeptide present in a TMMP of the present disclosure includes 7 amino acid substitutions (e.g., no more than 7 amino acid substitutions) compared to a corresponding reference (e.g., wild-type) immunomodulatory polypeptide. In some cases, variant immunomodulatory polypeptide present in a TMMP of the present disclosure includes 8 amino acid substitutions (e.g., no more than 8 amino acid substitutions) compared to a corresponding reference (e.g., wild-type) immunomodulatory polypeptide. In some cases, variant immunomodulatory polypeptide present in a TMMP of the present disclosure includes 9 amino acid substitutions (e.g., no more than 9 amino acid substitutions) compared to a corresponding reference (e.g., wild-type) immunomodulatory polypeptide. In some cases, variant immunomodulatory polypeptide present in a TMMP of the present disclosure includes 10 amino acid substitutions (e.g., no more than 10 amino acid substitutions) compared to a corresponding reference (e.g., wild-type) immunomodulatory polypeptide.

[0342] In some cases, variant immunomodulatory polypeptide present in a TMMP of the present disclosure includes 11 amino acid substitutions (e.g., no more than 11 amino acid substitutions) compared to a corresponding reference (e.g., wild-type) immunomodulatory polypeptide.

[0343] In some cases, variant immunomodulatory polypeptide present in a TMMP of the present disclosure includes 12 amino acid substitutions (e.g., no more than 12 amino acid substitutions) compared to a corresponding reference (e.g., wild-type) immunomodulatory polypeptide.

[0344] In some cases, variant immunomodulatory polypeptide present in a TMMP of the present disclosure includes 13 amino acid substitutions (e.g., no more than 13 amino acid substitutions) compared to a corresponding reference (e.g., wild-type) immunomodulatory polypeptide.

[0345] In some cases, variant immunomodulatory polypeptide present in a TMMP of the present disclosure includes 14 amino acid substitutions (e.g., no more than 14 amino acid substitutions) compared to a corresponding reference (e.g., wild-type) immunomodulatory polypeptide.

[0346] In some cases, variant immunomodulatory polypeptide present in a TMMP of the present disclosure includes 15 amino acid substitutions (e.g., no more than 15 amino acid substitutions) compared to a corresponding reference (e.g., wild-type) immunomodulatory polypeptide.

[0347] In some cases, variant immunomodulatory polypeptide present in a TMMP of the present disclosure includes 16 amino acid substitutions (e.g., no more than 16 amino acid substitutions) compared to a corresponding reference (e.g., wild-type) immunomodulatory polypeptide.

[0348] In some cases, variant immunomodulatory polypeptide present in a TMMP of the present disclosure includes 17 amino acid substitutions (e.g., no more than 17 amino acid substitutions) compared to a corresponding reference (e.g., wild-type) immunomodulatory polypeptide.

[0349] In some cases, variant immunomodulatory polypeptide present in a TMMP of the present disclosure includes 18 amino acid substitutions (e.g., no more than 18 amino acid substitutions) compared to a corresponding reference (e.g., wild-type) immunomodulatory polypeptide.

[0350] In some cases, variant immunomodulatory polypeptide present in a TMMP of the present disclosure includes 19 amino acid substitutions (e.g., no more than 19 amino acid substitutions) compared to a corresponding reference (e.g., wild-type) immunomodulatory polypeptide.

[0351] In some cases, variant immunomodulatory polypeptide present in a TMMP of the present disclosure includes 20 amino acid substitutions (e.g., no more than 20 amino acid substitutions) compared to a corresponding reference (e.g., wild-type) immunomodulatory polypeptide.

[0352] As discussed above, a variant immunomodulatory polypeptide suitable for inclusion in a TMMP of the present disclosure exhibits reduced affinity for a cognate co-immunomodulatory polypeptide, compared to the affinity of a corresponding wild-type immunomodulatory polypeptide for the cognate co-immunomodulatory polypeptide.

[0353] Exemplary pairs of immunomodulatory polypeptide and cognate co-immunomodulatory polypeptide include, but are not limited to:

[0354] a) 4-1BBL (immunomodulatory polypeptide) and 4-1BB (cognate co-immunomodulatory polypeptide);

[0355] b) PD-L1 (immunomodulatory polypeptide) and PD1 (cognate co-immunomodulatory polypeptide);

[0356] c) IL-2 (immunomodulatory polypeptide) and IL-2 receptor (cognate co-immunomodulatory polypeptide);

[0357] d) CD80 (immunomodulatory polypeptide) and CD86 (cognate co-immunomodulatory polypeptide);

[0358] e) CD86 (immunomodulatory polypeptide) and CD28 (cognate co-immunomodulatory polypeptide);

[0359] f) OX40L (CD252) (immunomodulatory polypeptide) and OX40 (CD134) (cognate co-immunomodulatory polypeptide);

[0360] g) Fas ligand (immunomodulatory polypeptide) and Fas (cognate co-immunomodulatory polypeptide);

[0361] h) ICOS-L (immunomodulatory polypeptide) and ICOS (cognate co-immunomodulatory polypeptide);

[0362] i) ICAM (immunomodulatory polypeptide) and LFA-1 (cognate co-immunomodulatory polypeptide);

[0363] j) CD30L (immunomodulatory polypeptide) and CD30 (cognate co-immunomodulatory polypeptide);

[0364] k) CD40 (immunomodulatory polypeptide) and CD40L (cognate co-immunomodulatory polypeptide);

[0365] l) CD83 (immunomodulatory polypeptide) and CD83L (cognate co-immunomodulatory polypeptide);

[0366] m) HVEM (CD270) (immunomodulatory polypeptide) and CD160 (cognate co-immunomodulatory polypeptide);

[0367] n) JAG1 (CD339) (immunomodulatory polypeptide) and Notch (cognate co-immunomodulatory polypeptide);

[0368] o) JAG1 (immunomodulatory polypeptide) and CD46 (cognate co-immunomodulatory polypeptide);

[0369] p) CD80 (immunomodulatory polypeptide) and CTLA4 (cognate co-immunomodulatory polypeptide);

[0370] q) CD86 (immunomodulatory polypeptide) and CTLA4 (cognate co-immunomodulatory polypeptide); and

[0371] r) CD70 (immunomodulatory polypeptide) and CD27 (cognate co-immunomodulatory polypeptide).

[0372] In some cases, a variant immunomodulatory polypeptide present in a TMMP of the present disclosure has a binding affinity for a cognate co-immunomodulatory polypeptide that is from 100 nM to 100 μM. For example, in some cases, a variant immunomodulatory polypeptide present in a TMMP of the present disclosure has a binding affinity for a cognate co-immunomodulatory polypeptide that is from about 100 nM to 150 nM, from about 150 nM to about 200 nM, from about 200 nM to about 250 nM, from about 250 nM to about 300 nM, from about 300 nM to about 350 nM, from about 350 nM to about 400 nM, from about 400 nM to about 500 nM, from about 500 nM to about 600 nM, from about 600 nM to about 700 nM, from about 700 nM to about 800 nM, from about 800 nM to about 900 nM, from about 900 nM to about 1 μM, to about 1 μM to about 5 μM, from about 5 μM to about 10 μM, from about 10 μM to about 15 μM, from about 15 μM to about 20 μM, from about 20 μM to about 25 μM, from about 25 μM to about 50 μM, from about 50 μM to about 75 μM, or from about 75 μM to about 100 μM.

[0373] A variant immunomodulatory polypeptide present in a TMMP of the present disclosure exhibits reduced affinity for a cognate co-immunomodulatory polypeptide. Similarly, a TMMP of the present disclosure that comprises a variant immunomodulatory polypeptide exhibits reduced affinity for a cognate co-immunomodulatory polypeptide. Thus, for example, a TMMP of the present disclosure that comprises a variant immunomodulatory polypeptide has a binding affinity for a cognate co-immunomodulatory polypeptide that is from 100 nM to 100 μM. For example, in some cases, a TMMP of the present disclosure that comprises a variant immunomodulatory polypeptide has a binding affinity for a cognate co-immunomodulatory polypeptide that is from about 100 nM to 150 nM, from about 150 nM to about 200 nM, from about 200 nM to about 250 nM, from about 250 nM to about 300 nM, from about 300 nM to about 350 nM, from about 350 nM to about 400 nM, from about 400 nM to about 500 nM, from about 500 nM to about 600 nM, from about 600 nM to about 700 nM, from about 700 nM to about 800 nM, from about 800 nM to about 900 nM, from about 900 nM to about 1 μM, to about 1 μM to about 5 μM, from about 5 μM to about 10 μM, from about 10 μM to about 15 μM, from about 15 μM to about 20 μM, from about 20 μM to about 25 μM, from about 25 μM to about 50 μM, from about 50 μM to about 75 μM, or from about 75 μM to about 100 μM.

### PD-L1 Variants

[0374] As one non-limiting example, in some cases, a variant immunomodulatory polypeptide present in a TMMP of the present disclosure is a variant PD-L1 polypeptide. Wild-type PD-L1 binds to PD1.

[0375] A wild-type human PD-L1 polypeptide can comprise the following amino acid sequence:

(SEQ ID NO: 1)
MRIFAVFIFM TYWHLLNAFT VTVPKDLYVV EYGSNMTIEC
KFPVEKQLDL AALIVYWEME DKNIIQFVHG EEDLKVQHSS
YRQRARLLKD QLSLGNAALQ ITDVKLQDAG VYRCMISYGG
ADYKRITVKV NAPYNKINQR ILVVDPVTSE HELTCQAEGY
PKAEVIWTSS DHQVLSGKTT TTNSKREEKL FNVTSTLRIN
TTTNEIFYCT FRRLDPEENH TAELVIPGNI LNVSIKICLT
LSPST.

[0376] A wild-type human PD-L1 ectodomain can comprise the following amino acid sequence:

(SEQ ID NO: 2)
FT VTVPKDLYVV EYGSNMTIEC KFPVEKQLDL AALIVYWEME
DKNIIQFVHG EEDLKVQHSS YRQRARLLKD QLSLGNAALQ
ITDVKLQDAG VYRCMISYGG ADYKRITVKV NAPYNKINQR
ILVVDPVTSE HELTCQAEGY PKAEVIWTSS DHQVLSGKTT
TTNSKREEKL FNVTSTLRIN TTTNEIFYCT FRRLDPEENH
TAELVIPGNI LNVSIKI.

[0377] A wild-type PD-1 polypeptide can comprise the following amino acid sequence:

[0378] PGWFLDSPDR PWNPPTFSPA LLVVTEGDNA TFTCSFSNTS ESFVLNWYRM SPSNQTDKLA AFPEDRSQPG QDCRFRVTQL PNGRDFHMSV VRARRNDSGT YLCGAISLAP KAQIKESLRA ELRVTERRAE VPTAHPSPSP RPAGQFQTLV VGVVGGLLGS LVLLVWVLAV ICSRAARGTI GARRTGQPLK EDPSAVPVFS VDYGELDFQW REKTPEPPVβ CVPEQTEYAT IVFPSGMGTS SPARRGSADG PRSAQPLRPE DGHCSWPL (SEQ ID NO:3). In some cases, where a TMMP of the present disclosure comprises a variant PD-L1 polypeptide, a “cognate co-immunomodulatory polypeptide” is a PD-1 polypeptide comprising the amino acid sequence of SEQ ID NO:3.

[0379] In some cases, a variant PD-L1 polypeptide exhibits reduced binding affinity to PD-1 (e.g., a PD-1 polypeptide comprising the amino acid sequence set forth in SEQ ID NO:3), compared to the binding affinity of a PD-L1 polypeptide comprising the amino acid sequence set forth in SEQ ID NO:1 or SEQ ID NO:2. For example, in some cases, a variant PD-L1 polypeptide of the present disclosure binds PD-1 (e.g., a PD-1 polypeptide comprising the amino acid sequence set forth in SEQ ID NO:3) with a binding affinity that is at least 10%, at least 15%, at least 20%, at least 25%, at least 30%, at least 35%, at least 40%, at least 45%, at least 50% less, at least 55% less, at least 60% less, at least 65% less, at least 70% less, at least 75% less, at least 80% less, at least 85% less, at least 90% less, at least 95% less, or more than 95% less, than the binding affinity of a PD-L1 polypeptide comprising the amino acid sequence set forth in SEQ ID NO:1 or SEQ ID NO:2.

[0380] In some cases, a variant PD-L1 polypeptide has a binding affinity to PD-1 that is from 1 nM to 1 mM. In some cases, a variant PD-L1 polypeptide of the present disclosure has a binding affinity to PD-1 that is from 100 nM to 100 μM. As another example, in some cases, a variant PD-L1 polypeptide has a binding affinity for PD1 (e.g., a PD1 polypeptide comprising the amino acid sequence set forth in SEQ ID NO:3) that is from about 100 nM to 150 nM, from about 150 nM to about 200 nM, from about 200 nM to about 250 nM, from about 250 nM to about 300 nM, from about 300 nM to about 350 nM, from about 350 nM to about 400 nM, from about 400 nM to about 500 nM, from about 500 nM to about 600 nM, from about 600 nM to about 700 nM, from about 700 nM to about 800 nM, from about 800 nM to about 900 nM, from about 900 nM to about 1 μM, to about 1 μM to about 5 μM, from about 5 μM to about 10 μM, from about 10 μM to about 15 μM, from about 15 μM to about 20 μM, from about μM to about 25 μM, from about 25 μM to about 50 μM, from about 50 μM to about 75 μM, or from about 75 μM to about 100 μM.

[0381] In some cases, a variant PD-L1 polypeptide has a single amino acid substitution compared to the PD-L1 amino acid sequence set forth in SEQ ID NO:1 or SEQ ID NO:2. In some cases, a variant PD-L1 polypeptide has from 2 to 10 amino acid substitutions compared to the PD-L1 amino acid sequence set forth in SEQ ID NO:1 or SEQ ID NO:2. In some cases, a variant PD-L1 polypeptide has 2 amino acid substitutions compared to the PD-L1 amino acid sequence set forth in SEQ ID NO:1 or SEQ ID NO:2. In some cases, a variant PD-L1 polypeptide has 3 amino acid substitutions compared to the PD-L1 amino acid sequence set forth in SEQ ID NO:1 or SEQ ID NO:2. In some cases, a variant PD-L1 polypeptide has 4 amino acid substitutions compared to the PD-L1 amino acid sequence set forth in SEQ ID NO:1 or SEQ ID NO:2. In some cases, a variant PD-L1 polypeptide has 5 amino acid substitutions compared to the PD-L1 amino acid sequence set forth in SEQ ID NO:1 or SEQ ID NO:2. In some cases, a variant PD-L1 polypeptide has 6 amino acid substitutions compared to the PD-L1 amino acid sequence set forth in SEQ ID NO:1 or SEQ ID NO:2. In some cases, a variant PD-L1 polypeptide has 7 amino acid substitutions compared to the PD-L1 amino acid sequence set forth in SEQ ID NO:1 or SEQ ID NO:2. In some cases, a variant PD-L1 polypeptide has 8 amino acid substitutions compared to the PD-L1 amino acid sequence set forth in SEQ ID NO:1 or SEQ ID NO:2. In some cases, a variant PD-L1 polypeptide has 9 amino acid substitutions compared to the PD-L1 amino acid sequence set forth in SEQ ID NO:1 or SEQ ID NO:2. In some cases, a variant PD-L1 polypeptide has 10 amino acid substitutions compared to the PD-L1 amino acid sequence set forth in SEQ ID NO:1 or SEQ ID NO:2.

[0382] A suitable PD-L1 variant includes a polypeptide that comprises an amino acid sequence having at least 90%, at least 95%, at least 98%, at least 99%, or 100%, amino acid sequence identity to the following amino acid sequence:

[0383] FT VTVPKXLYVV EYGSNMTIEC KFPVEKQLDL AALIVYWEME DKNIIQFVHG EEDLKVQHSS YRQRARLLKD QLSLGNAALQ ITDVKLQDAG VYRCMISYGG ADYKRITVKV NAPYNKINQR ILVVDPVTSE HELTCQAEGY PKAEVIWTSS DHQVLSGKTT TTNSKREEKL FNVTSTLRIN TTTNEIFYCT FRRLDPEENH TAELVIPGNI LNVSIKI (SEQ ID NO:398), where X is any amino acid other than Asp. In some cases, X is Ala. In some cases, X is Arg.

[0384] A suitable PD-L1 variant includes a polypeptide that comprises an amino acid sequence having at least 90%, at least 95%, at least 98%, at least 99%, or 100%, amino acid sequence identity to the following amino acid sequence:

[0385] FT VTVPKDLYVV EYGSNMTIEC KFPVEKQLDL AALXVYWEME DKNIIQFVHG EEDLKVQHSS YRQRARLLKD QLSLGNAALQ ITDVKLQDAG VYRCMISYGG ADYKRITVKV NAPYNKINQR ILVVDPVTSE HELTCQAEGY PKAEVIWTSS DHQVLSGKTT TTNSKREEKL FNVTSTLRIN TTTNEIFYCT FRRLDPEENH TAELVIPGNI LNVSIKI (SEQ ID NO:399), where X is any amino acid other than Ile. In some cases, X is Asp.

[0386] A suitable PD-L1 variant includes a polypeptide that comprises an amino acid sequence having at least 90%, at least 95%, at least 98%, at least 99%, or 100%, amino acid sequence identity to the following amino acid sequence:

[0387] FT VTVPKDLYVV EYGSNMTIEC KFPVEKQLDL AALIVYWEME DKNIIQFVHG EXDLKVQHSS YRQRARLLKD QLSLGNAALQ ITDVKLQDAG VYRCMISYGG ADYKRITVKV NAPYNKINQR ILVVDPVTSE HELTCQAEGY PKAEVIWTSS DHQVLSGKTT TTNSKREEKL FNVTSTLRIN TTTNEIFYCT FRRLDPEENH TAELVIPGNI LNVSIKI (SEQ ID NO:400), where X is any amino acid other than Glu. In some cases, X is Arg.

### CD80 Variants

[0388] In some cases, a variant immunomodulatory polypeptide present in a TMMP of the present disclosure is a variant CD80 polypeptide. Wild-type CD80 binds to CD28. Wild-type CD80 also binds to CD86.

[0389] A wild-type amino acid sequence of the ectodomain of human CD80 can be as follows:

(SEQ ID NO: 4)
VIHVTK EVKEVATLSC GHNVSVEELA QTRIYWQKEK
KMVLTMMSGD MNIWPEYKNR TIFDITNNLS IVILALRPSD
EGTYECVVLK YEKDAFKREH LAEVTLSVKA DFPTPSISDF
EIPTSNIRRI ICSTSGGFPE PHLSWLENGE ELNAINTTVS
QDPETELYAV SSKLDFNMTT NHSFMCLIKY GHLRVNQTFN
WNTTKQEHFP DN.

[0390] A wild-type CD28 amino acid sequence can be as follows: MLRLLLALNL FPSIQVTGNK ILVKQSPMLV AYDNAVNLSC KYSYNLFSRE FRASLHKGLD SAVEVCVVYG NYSQQLQVYS KTGFNCDGKL GNESVTFYLQ NLYVNQTDIY FCKIEVMYPP PYLDNEKSNG TIIHVKGKHL CPSPLFPGPS KPFWVLVVVG GVLACYSLLV TVAFIIFWVR SKRSRLLHSD YMNMTPRRPG PTRKHYQPYA PPRDFAAYRS (SEQ ID NO:5). In some cases, where a TMMP of the present disclosure comprises a variant CD80 polypeptide, a “cognate co-immunomodulatory polypeptide” is a CD28 polypeptide comprising the amino acid sequence of SEQ ID NO:5.

[0391] A wild-type CD28 amino acid sequence can be as follows: MLRLLLALNL FPSIQVTGNK ILVKQSPMLV AYDNAVNLSW KHLCPSPLFP GPSKPFWVLV VVGGVLACYS LLVTVAFIIF WVRSKRSRLL HSDYMNMTPR RPGPTRKHYQ PYAPPRDFAA YRS (SEQ ID NO:6)

[0392] A wild-type CD28 amino acid sequence can be as follows: MLRLLLALNL FPSIQVTGKH LCPSPLFPGP SKPFWVLVVV GGVLACYSLL VTVAFIIFWV RSKRSRLLHS DYMNMTPRRP GPTRKHYQPY APPRDFAAYR S (SEQ ID NO:7).

[0393] In some cases, a variant CD80 polypeptide exhibits reduced binding affinity to CD28, compared to the binding affinity of a CD80 polypeptide comprising the amino acid sequence set forth in SEQ ID NO:4 for CD28. For example, in some cases, a variant CD80 polypeptide binds CD28 with a binding affinity that is at least 10%, at least 15%, at least 20%, at least 25%, at least 30%, at least 35%, at least 40%, at least 45%, at least 50% less, at least 55% less, at least 60% less, at least 65% less, at least 70% less, at least 75% less, at least 80% less, at least 85% less, at least 90% less, at least 95% less, or more than 95% less, than the binding affinity of a CD80 polypeptide comprising the amino acid sequence set forth in SEQ ID NO:4 for CD28 (e.g., a CD28 polypeptide comprising the amino acid sequence set forth in one of SEQ ID NO:5, 6, or 7).

[0394] In some cases, a variant CD80 polypeptide has a binding affinity to CD28 that is from 100 nM to 100 μM. As another example, in some cases, a variant CD80 polypeptide of the present disclosure has a binding affinity for CD28 (e.g., a CD28 polypeptide comprising the amino acid sequence set forth in SEQ ID NO:5, SEQ ID NO:6, or SEQ ID NO:7) that is from about 100 nM to 150 nM, from about 150 nM to about 200 nM, from about 200 nM to about 250 nM, from about 250 nM to about 300 nM, from about 300 nM to about 350 nM, from about 350 nM to about 400 nM, from about 400 nM to about 500 nM, from about 500 nM to about 600 nM, from about 600 nM to about 700 nM, from about 700 nM to about 800 nM, from about 800 nM to about 900 nM, from about 900 nM to about 1 μM, to about 1 μM to about 5 μM, from about 5 μM to about 10 μM, from about 10 μM to about 15 μM, from about 15 μM to about 20 μM, from about 20 μM to about 25 μM, from about 25 μM to about 50 μM, from about 50 μM to about 75 μM, or from about 75 μM to about 100 μM.

[0395] In some cases, a variant CD80 polypeptide has a single amino acid substitution compared to the CD80 amino acid sequence set forth in SEQ ID NO:4. In some cases, a variant CD80 polypeptide has from 2 to 10 amino acid substitutions compared to the CD80 amino acid sequence set forth in SEQ ID NO:4. In some cases, a variant CD80 polypeptide has 2 amino acid substitutions compared to the CD80 amino acid sequence set forth in SEQ ID NO:4. In some cases, a variant CD80 polypeptide has 3 amino acid substitutions compared to the CD80 amino acid sequence set forth in SEQ ID NO:4. In some cases, a variant CD80 polypeptide has 4 amino acid substitutions compared to the CD80 amino acid sequence set forth in SEQ ID NO:4. In some cases, a variant CD80 polypeptide has 5 amino acid substitutions compared to the CD80 amino acid sequence set forth in SEQ ID NO:4. In some cases, a variant CD80 polypeptide has 6 amino acid substitutions compared to the CD80 amino acid sequence set forth in SEQ ID NO:4. In some cases, a variant CD80 polypeptide has 7 amino acid substitutions compared to the CD80 amino acid sequence set forth in SEQ ID NO:4. In some cases, a variant CD80 polypeptide has 8 amino acid substitutions compared to the CD80 amino acid sequence set forth in SEQ ID NO:4. In some cases, a variant CD80 polypeptide has 9 amino acid substitutions compared to the CD80 amino acid sequence set forth in SEQ ID NO:4. In some cases, a variant CD80 polypeptide has 10 amino acid substitutions compared to the CD80 amino acid sequence set forth in SEQ ID NO:4.

[0396] Suitable CD80 variants include a polypeptide that comprises an amino acid sequence having at least 90%, at least 95%, at least 98%, at least 99%, or 100%, amino acid sequence identity to any one of the following amino acid sequences:

[0397] VIHVTK EVKEVATLSC GHXVSVEELA QTRIYWQKEK KMVLTMMSGD MNIWPEYKNR TIFDITNNLS IVILALRPSD EGTYECVVLK YEKDAFKREH LAEVTLSVKA DFPTPSISDF EIPTSNIRRI ICSTSGGFPE PHLSWLENGE ELNAINTTVS QDPETELYAV SSKLDFNMTT NHSFMCLIKY GHLRVNQTFN WNTTKQEHFP DN (SEQ ID NO:401), where X is any amino acid other than Asn. In some cases, X is Ala;

[0398] VIHVTK EVKEVATLSC GHNVSVEELA QTRIYWQKEK KMVLTMMSGD MNIWPEYKNR TIFDITXNLS IVILALRPSD EGTYECVVLK YEKDAFKREH LAEVTLSVKA DFPTPSISDF EIPTSNIRRI ICSTSGGFPE PHLSWLENGE ELNAINTTVS QDPETELYAV SSKLDFNMTT NHSFMCLIKY GHLRVNQTFN WNTTKQEHFP DN (SEQ ID NO:402), where X is any amino acid other than Asn. In some cases, X is Ala;

[0399] VIHVTK EVKEVATLSC GHNVSVEELA QTRIYWQKEK KMVLTMMSGD MNIWPEYKNR TIFDITNNLS XVILALRPSD EGTYECVVLK YEKDAFKREH LAEVTLSVKA DFPTPSISDF EIPTSNIRRI ICSTSGGFPE PHLSWLENGE ELNAINTTVS QDPETELYAV SSKLDFNMTT NHSFMCLIKY GHLRVNQTFN WNTTKQEHFP DN (SEQ ID NO:403), where X is any amino acid other than Ile. In some cases, X is Ala;

[0400] VIHVTK EVKEVATLSC GHNVSVEELA QTRIYWQKEK KMVLTMMSGD MNIWPEYKNR TIFDITNNLS IVILALRPSD EGTYECVVLX YEKDAFKREH LAEVTLSVKA DFPTPSISDF EIPTSNIRRI ICSTSGGFPE PHLSWLENGE ELNAINTTVS QDPETELYAV SSKLDFNMTT NHSFMCLIKY GHLRVNQTFN WNTTKQEHFP DN (SEQ ID NO:404), where X is any amino acid other than Lys. In some cases, X is Ala;

[0401] VIHVTK EVKEVATLSC GHNVSVEELA QTRIYWQKEK KMVLTMMSGD MNIWPEYKNR TIFDITNNLS IVILALRPSD EGTYECVVLK YEKDAFKREH LAEVTLSVKA DFPTPSISDF EIPTSNIRRI ICSTSGGFPE PHLSWLENGE ELNAINTTVS XDPETELYAV SSKLDFNMTT NHSFMCLIKY GHLRVNQTFN WNTTKQEHFP DN (SEQ ID NO:405), where X is any amino acid other than Gln. In some cases, X is Ala;

[0402] VIHVTK EVKEVATLSC GHNVSVEELA QTRIYWQKEK KMVLTMMSGD MNIWPEYKNR TIFDITNNLS IVILALRPSD EGTYECVVLK YEKDAFKREH LAEVTLSVKA DFPTPSISDF EIPTSNIRRI ICSTSGGFPE PHLSWLENGE ELNAINTTVS QXPETELYAV SSKLDFNMTT NHSFMCLIKY GHLRVNQTFN WNTTKQEHFP DN (SEQ ID NO:406), where X is any amino acid other than Asp. In some cases, X is Ala;

[0403] VIHVTK EVKEVATLSC GHNVSVEEXA QTRIYWQKEK KMVLTMMSGD MNIWPEYKNR TIFDITNNLS IVILALRPSD EGTYECVVLK YEKDAFKREH LAEVTLSVKA DFPTPSISDF EIPTSNIRRI ICSTSGGFPE PHLSWLENGE ELNAINTTVS QDPETELYAV SSKLDFNMTT NHSFMCLIKY GHLRVNQTFN WNTTKQEHFP DN (SEQ ID NO:407), where X is any amino acid other than Leu. In some cases, X is Ala;

[0404] VIHVTK EVKEVATLSC GHNVSVEELA QTRIXWQKEK KMVLTMMSGD MNIWPEYKNR TIFDITNNLS IVILALRPSD EGTYECVVLK YEKDAFKREH LAEVTLSVKA DFPTPSISDF EIPTSNIRRI ICSTSGGFPE PHLSWLENGE ELNAINTTVS QDPETELYAV SSKLDFNMTT NHSFMCLIKY GHLRVNQTFN WNTTKQEHFP DN (SEQ ID NO:408), where X is any amino acid other than Tyr. In some cases, X is Ala;

[0405] VIHVTK EVKEVATLSC GHNVSVEELA QTRIYWXKEK KMVLTMMSGD MNIWPEYKNR TIFDITNNLS IVILALRPSD EGTYECVVLK YEKDAFKREH LAEVTLSVKA DFPTPSISDF EIPTSNIRRI ICSTSGGFPE PHLSWLENGE ELNAINTTVS QDPETELYAV SSKLDFNMTT NHSFMCLIKY GHLRVNQTFN WNTTKQEHFP DN (SEQ ID NO:409), where X is any amino acid other than Gln. In some cases, X is Ala;

[0406] VIHVTK EVKEVATLSC GHNVSVEELA QTRIYWQKEK KXVLTMMSGD MNIWPEYKNR TIFDITNNLS IVILALRPSD EGTYECVVLK YEKDAFKREH LAEVTLSVKA DFPTPSISDF EIPTSNIRRI ICSTSGGFPE PHLSWLENGE ELNAINTTVS QDPETELYAV SSKLDFNMTT NHSFMCLIKY GHLRVNQTFN WNTTKQEHFP DN (SEQ ID NO:410), where X is any amino acid other than Met. In some cases, X is Ala;

[0407] VIHVTK EVKEVATLSC GHNVSVEELA QTRIYWQKEK KMXLTMMSGD MNIWPEYKNR TIFDITNNLS IVILALRPSD EGTYECVVLK YEKDAFKREH LAEVTLSVKA DFPTPSISDF EIPTSNIRRI ICSTSGGFPE PHLSWLENGE ELNAINTTVS QDPETELYAV SSKLDFNMTT NHSFMCLIKY GHLRVNQTFN WNTTKQEHFP DN (SEQ ID NO:411), where X is any amino acid other than Val. In some cases, X is Ala;

[0408] VIHVTK EVKEVATLSC GHNVSVEELA QTRIYWQKEK KMVLTMMSGD MNXWPEYKNR TIFDITNNLS IVILALRPSD EGTYECVVLK YEKDAFKREH LAEVTLSVKA DFPTPSISDF EIPTSNIRRI ICSTSGGFPE PHLSWLENGE ELNAINTTVS QDPETELYAV SSKLDFNMTT NHSFMCLIKY GHLRVNQTFN WNTTKQEHFP DN (SEQ ID NO:412), where X is any amino acid other than Ile. In some cases, X is Ala;

[0409] VIHVTK EVKEVATLSC GHNVSVEELA QTRIYWQKEK KMVLTMMSGD MNIWPEXKNR TIFDITNNLS IVILALRPSD EGTYECVVLK YEKDAFKREH LAEVTLSVKA DFPTPSISDF EIPTSNIRRI ICSTSGGFPE PHLSWLENGE ELNAINTTVS QDPETELYAV SSKLDFNMTT NHSFMCLIKY GHLRVNQTFN WNTTKQEHFP DN (SEQ ID NO:413), where X is any amino acid other than Tyr. In some cases, X is Ala;

[0410] VIHVTK EVKEVATLSC GHNVSVEELA QTRIYWQKEK KMVLTMMSGD MNIWPEYKNR TIFXITNNLS IVILALRPSD EGTYECVVLK YEKDAFKREH LAEVTLSVKA DFPTPSISDF EIPTSNIRRI ICSTSGGFPE PHLSWLENGE ELNAINTTVS QDPETELYAV SSKLDFNMTT NHSFMCLIKY GHLRVNQTFN WNTTKQEHFP DN (SEQ ID NO:414), where X is any amino acid other than Asp. In some cases, X is Ala;

[0411] VIHVTK EVKEVATLSC GHNVSVEELA QTRIYWQKEK KMVLTMMSGD MNIWPEYKNR TIFDITNNLS IVILALRPSD EGTYECVVLK YEKDAFKREH LAEVTLSVKA DXPTPSISDF EIPTSNIRRI ICSTSGGFPE PHLSWLENGE ELNAINTTVS QDPETELYAV SSKLDFNMTT NHSFMCLIKY GHLRVNQTFN WNTTKQEHFP DN (SEQ ID NO:415), where X is any amino acid other than Phe. In some cases, X is Ala;

[0412] VIHVTK EVKEVATLSC GHNVSVEELA QTRIYWQKEK KMVLTMMSGD MNIWPEYKNR TIFDITNNLS IVILALRPSD EGTYECVVLK YEKDAFKREH LAEVTLSVKA DFPTPSISDF EIPTSNIRRI ICSTSGGFPE PHLSWLENGE ELNAINTTVXQDPETELYAV SSKLDFNMTT NHSFMCLIKY GHLRVNQTFN WNTTKQEHFP DN (SEQ ID NO:416), where X is any amino acid other than Ser. In some cases, X is Ala; and

[0413] VIHVTK EVKEVATLSC GHNVSVEELA QTRIYWQKEK KMVLTMMSGD MNIWPEYKNR TIFDITNNLS IVILALRPSD EGTYECVVLK YEKDAFKREH LAEVTLSVKA DFPTXSISDF EIPTSNIRRI ICSTSGGFPE PHLSWLENGE ELNAINTTVS QDPETELYAV SSKLDFNMTT NHSFMCLIKY GHLRVNQTFN WNTTKQEHFP DN (SEQ ID NO:417), where X is any amino acid other than Pro. In some cases, X is Ala.

### CD86 Variants

[0414] In some cases, a variant immunomodulatory polypeptide present in a TMMP of the present disclosure is a variant CD86 polypeptide. Wild-type CD86 binds to CD28. In some cases, where a TMMP of the present disclosure comprises a variant CD86 polypeptide, a “cognate co-immunomodulatory polypeptide” is a CD28 polypeptide comprising the amino acid sequence of SEQ ID NO:5.

[0415] The amino acid sequence of the full ectodomain of a wild-type human CD86 can be as follows:

(SEQ ID NO: 8)
APLKIQAYFNETADLPCQFANSQNQSLSELVVFWQDQENLVLNE
VYLGKEKFDSVHSKYMNRTSFDSDSWTLRLHNLQIKDKGLYQCI
IHHKKPTGMIRIHQMNSELSVLANFSQPEIVPISNITENVYINL
TCSSIHGYPEPKKMSVLLRTKNSTIEYDGIMQKSQDNVTELYDV
SISLSVSFPDVTSNMTIFCILETDKTRLLSSPFSIELEDPQPPP
DHIP.

[0416] The amino acid sequence of the IgV domain of a wild-type human CD86 can be as follows:

(SEQ ID NO: 9)
APLKIQAYFNETADLPCQFANSQNQSLSELVVFWQDQENLVLNEV
YLGKEKFDSVHSKYMNRTSFDSDSWTLRLHNLQIKDKGLYQCIIH
HKKPTGMIRIHQMNSELSVL.

[0417] In some cases, a variant CD86 polypeptide exhibits reduced binding affinity to CD28, compared to the binding affinity of a CD86 polypeptide comprising the amino acid sequence set forth in SEQ ID NO:8 or SEQ ID NO:9 for CD28. For example, in some cases, a variant CD86 polypeptide binds CD28 with a binding affinity that is at least 10%, at least 15%, at least 20%, at least 25%, at least 30%, at least 35%, at least 40%, at least 45%, at least 50% less, at least 55% less, at least 60% less, at least 65% less, at least 70% less, at least 75% less, at least 80% less, at least 85% less, at least 90% less, at least 95% less, or more than 95% less, than the binding affinity of a CD86 polypeptide comprising the amino acid sequence set forth in SEQ ID NO:8 or SEQ ID NO:9 for CD28 (e.g., a CD28 polypeptide comprising the amino acid sequence set forth in one of SEQ ID NO:5, 6, or 7).

[0418] In some cases, a variant CD86 polypeptide has a binding affinity to CD28 that is from 100 nM to 100 μM. As another example, in some cases, a variant CD86 polypeptide of the present disclosure has a binding affinity for CD28 (e.g., a CD28 polypeptide comprising the amino acid sequence set forth in one of SEQ ID NOs:5, 6, or 7) that is from about 100 nM to 150 nM, from about 150 nM to about 200 nM, from about 200 nM to about 250 nM, from about 250 nM to about 300 nM, from about 300 nM to about 350 nM, from about 350 nM to about 400 nM, from about 400 nM to about 500 nM, from about 500 nM to about 600 nM, from about 600 nM to about 700 nM, from about 700 nM to about 800 nM, from about 800 nM to about 900 nM, from about 900 nM to about 1 μM, to about 1 μM to about 5 μM, from about 5 μM to about 10 μM, from about 10 μM to about 15 μM, from about 15 μM to about 20 μM, from about 20 μM to about 25 μM, from about 25 μM to about 50 μM, from about 50 μM to about 75 μM, or from about 75 μM to about 100 μM.

[0419] In some cases, a variant CD86 polypeptide has a single amino acid substitution compared to the CD86 amino acid sequence set forth in SEQ ID NO:8. In some cases, a variant CD86 polypeptide has from 2 to 10 amino acid substitutions compared to the CD86 amino acid sequence set forth in SEQ ID NO:8. In some cases, a variant CD86 polypeptide has 2 amino acid substitutions compared to the CD86 amino acid sequence set forth in SEQ ID NO:8. In some cases, a variant CD86 polypeptide has 3 amino acid substitutions compared to the CD86 amino acid sequence set forth in SEQ ID NO:8. In some cases, a variant CD86 polypeptide has 4 amino acid substitutions compared to the CD86 amino acid sequence set forth in SEQ ID NO:8. In some cases, a variant CD86 polypeptide has 5 amino acid substitutions compared to the CD86 amino acid sequence set forth in SEQ ID NO:8. In some cases, a variant CD86 polypeptide has 6 amino acid substitutions compared to the CD86 amino acid sequence set forth in SEQ ID NO:8. In some cases, a variant CD86 polypeptide has 7 amino acid substitutions compared to the CD86 amino acid sequence set forth in SEQ ID NO:8. In some cases, a variant CD86 polypeptide has 8 amino acid substitutions compared to the CD86 amino acid sequence set forth in SEQ ID NO:8. In some cases, a variant CD86 polypeptide has 9 amino acid substitutions compared to the CD86 amino acid sequence set forth in SEQ ID NO:8. In some cases, a variant CD86 polypeptide has 10 amino acid substitutions compared to the CD86 amino acid sequence set forth in SEQ ID NO:8.

[0420] In some cases, a variant CD86 polypeptide has a single amino acid substitution compared to the CD86 amino acid sequence set forth in SEQ ID NO:9. In some cases, a variant CD86 polypeptide has from 2 to 10 amino acid substitutions compared to the CD86 amino acid sequence set forth in SEQ ID NO:9. In some cases, a variant CD86 polypeptide has 2 amino acid substitutions compared to the CD86 amino acid sequence set forth in SEQ ID NO:9. In some cases, a variant CD86 polypeptide has 3 amino acid substitutions compared to the CD86 amino acid sequence set forth in SEQ ID NO:9. In some cases, a variant CD86 polypeptide has 4 amino acid substitutions compared to the CD86 amino acid sequence set forth in SEQ ID NO:9. In some cases, a variant CD86 polypeptide has 5 amino acid substitutions compared to the CD86 amino acid sequence set forth in SEQ ID NO:9. In some cases, a variant CD86 polypeptide has 6 amino acid substitutions compared to the CD86 amino acid sequence set forth in SEQ ID NO:9. In some cases, a variant CD86 polypeptide has 7 amino acid substitutions compared to the CD86 amino acid sequence set forth in SEQ ID NO:9. In some cases, a variant CD86 polypeptide has 8 amino acid substitutions compared to the CD86 amino acid sequence set forth in SEQ ID NO:9. In some cases, a variant CD86 polypeptide has 9 amino acid substitutions compared to the CD86 amino acid sequence set forth in SEQ ID NO:9. In some cases, a variant CD86 polypeptide has 10 amino acid substitutions compared to the CD86 amino acid sequence set forth in SEQ ID NO:9.

[0421] Suitable CD86 variants include a polypeptide that comprises an amino acid sequence having at least 90%, at least 95%, at least 98%, at least 99%, or 100%, amino acid sequence identity to any one of the following amino acid sequences:

[0422] APLKIQAYFNETADLPCQFANSQNQSLSELVVFWQDQENLVLNEVYLGKEKFDS VHSKYMXRTSFDSDSWTLRLHNLQIKDKGLYQCIIHHKKPTGMIRIHQMNSELSVLANFSQPEIV PISNITENVYINLTCSSIHGYPEPKKMSVLLRTKNSTIEYDGIMQKSQDNVTELYDVSISLSVSFPD VTSNMTIFCILETDKTRLLSSPFSIELEDPQPPPDHIP (SEQ ID NO:418), where X is any amino acid other than Asn. In some cases, X is Ala;

[0423] APLKIQAYFNETADLPCQFANSQNQSLSELVVFWQDQENLVLNEVYLGKEKFDS VHSKYMNRTSFXSDSWTLRLHNLQIKDKGLYQCIIHHKKPTGMIRIHQMNSELSVLANFSQPEIV PISNITENVYINLTCSSIHGYPEPKKMSVLLRTKNSTIEYDGIMQKSQDNVTELYDVSISLSVSFPD VTSNMTIFCILETDKTRLLSSPFSIELEDPQPPPDHIP (SEQ ID NO:419), where X is any amino acid other than Asp. In some cases, X is Ala;

[0424] APLKIQAYFNETADLPCQFANSQNQSLSELVVFWQDQENLVLNEVYLGKEKFDS VHSKYMNRTSFDSDSXTLRLHNLQIKDKGLYQCIIHHKKPTGMIRIHQMNSELSVLANFSQPEIV PISNITENVYINLTCSSIHGYPEPKKMSVLLRTKNSTIEYDGIMQKSQDNVTELYDVSISLSVSFPD VTSNMTIFCILETDKTRLLSSPFSIELEDPQPPPDHIP (SEQ ID NO:420), where X is any amino acid other than Trp. In some cases, X is Ala;

[0425] APLKIQAYFNETADLPCQFANSQNQSLSELVVFWQDQENLVLNEVYLGKEKFDS VHSKYMNRTSFDSDSWTLRLHNLQIKDKGLYQCIIHXKKPTGMIRIHQMNSELSVLANFSQPEIV PISNITENVYINLTCSSIHGYPEPKKMSVLLRTKNSTIEYDGIMQKSQDNVTELYDVSISLSVSFPD VTSNMTIFCILETDKTRLLSSPFSIELEDPQPPPDHIP (SEQ ID NO:421), where X is any amino acid other than His. In some cases, X is Ala;

[0426] APLKIQAYFNETADLPCQFANSQNQSLSELVVFWQDQENLVLNEVYLGKEKFDS VHSKYMXRTSFDSDSWTLRLHNLQIKDKGLYQCIIHHKKPTGMIRIHQMNSELSVL (SEQ ID NO:422), where X is any amino acid other than Asn. In some cases, X is Ala;

[0427] APLKIQAYFNETADLPCQFANSQNQSLSELVVFWQDQENLVLNEVYLGKEKFDS VHSKYMNRTSFXSDSWTLRLHNLQIKDKGLYQCIIHHKKPTGMIRIHQMNSELSVL (SEQ ID NO:423), where X is any amino acid other than Asp. In some cases, X is Ala;

[0428] APLKIQAYFNETADLPCQFANSQNQSLSELVVFWQDQENLVLNEVYLGKEKFDS VHSKYMNRTSFDSDSXTLRLHNLQIKDKGLYQCIIHHKKPTGMIRIHQMNSELSVL (SEQ ID NO:424), where X is any amino acid other than Trp. In some cases, X is Ala;

[0429] APLKIQAYFNETADLPCQFANSQNQSLSELVVFWQDQENLVLNEVYLGKEKFDS VHSKYMNRTSFDSDSWTLRLHNLQIKDKGLYQCIIHXKKPTGMIRIHQMNSELSVL (SEQ ID NO:425), where X is any amino acid other than His. In some cases, X is Ala;

[0430] APLKIQAYFNETADLPCQFANSQNQSLSELVVFWQDQENLXLNEVYLGKEKFDS VHSKYMNRTSFDSDSWTLRLHNLQIKDKGLYQCIIHHKKPTGMIRIHQMNSELSVLANFSQPEIV PISNITENVYINLTCSSIHGYPEPKKMSVLLRTKNSTIEYDGIMQKSQDNVTELYDVSISLSVSFPD VTSNMTIFCILETDKTRLLSSPFSIELEDPQPPPDHIP (SEQ ID NO:426), where X is any amino acid other than Val. In some cases, X is Ala;

[0431] APLKIQAYFNETADLPCQFANSQNQSLSELVVFWQDQENLXLNEVYLGKEKFDS VHSKYMNRTSFDSDSWTLRLHNLQIKDKGLYQCIIHHKKPTGMIRIHQMNSELSVL (SEQ ID NO:427), where X is any amino acid other than Val. In some cases, X is Ala;

[0432] APLKIQAYFNETADLPCQFANSQNQSLSELVVFWXDQENLVLNEVYLGKEKFDS VHSKYMNRTSFDSDSWTLRLHNLQIKDKGLYQCIIHHKKPTGMIRIHQMNSELSVLANFSQPEIV PISNITENVYINLTCSSIHGYPEPKKMSVLLRTKNSTIEYDGIMQKSQDNVTELYDVSISLSVSFPD VTSNMTIFCILETDKTRLLSSPFSIELEDPQPPPDHIP (SEQ ID NO:428), where X is any amino acid other than Gln. In some cases, X is Ala;

[0433] APLKIQAYFNETADLPCQFANSQNQSLSELVVFWXDQENLVLNEVYLGKEKFDS VHSKYMNRTSFDSDSWTLRLHNLQIKDKGLYQCIIHHKKPTGMIRIHQMNSELSVL (SEQ ID NO:429), where X is any amino acid other than Gln. In some cases, X is Ala;

[0434] APLKIQAYFNETADLPCQFANSQNQSLSELVVXWQDQENLVLNEVYLGKEKFDS VHSKYMNRTSFDSDSWTLRLHNLQIKDKGLYQCIIHHKKPTGMIRIHQMNSELSVLANFSQPEIV PISNITENVYINLTCSSIHGYPEPKKMSVLLRTKNSTIEYDGIMQKSQDNVTELYDVSISLSVSFPD VTSNMTIFCILETDKTRLLSSPFSIELEDPQPPPDHIP (SEQ ID NO:430), where X is any amino acid other than Phe. In some cases, X is Ala;

[0435] APLKIQAYFNETADLPCQFANSQNQSLSELVVXWQDQENLVLNEVYLGKEKFDS VHSKYMNRTSFDSDSWTLRLHNLQIKDKGLYQCIIHHKKPTGMIRIHQMNSELSVL (SEQ ID NO:431), where X is any amino acid other than Phe. In some cases, X is Ala;

[0436] APLKIQAYFNETADLPCQFANSQNQSLSELVVFWQDQENLVLNEVYLGKEKFDS VHSKYMNRTSFDSDSWTXRLHNLQIKDKGLYQCIIHHKKPTGMIRIHQMNSELSVLANFSQPEIV PISNITENVYINLTCSSIHGYPEPKKMSVLLRTKNSTIEYDGIMQKSQDNVTELYDVSISLSVSFPD VTSNMTIFCILETDKTRLLSSPFSIELEDPQPPPDHIP (SEQ ID NO:432), where X is any amino acid other than Leu. In some cases, X is Ala;

[0437] APLKIQAYFNETADLPCQFANSQNQSLSELVVFWQDQENLVLNEVYLGKEKFDS VHSKYMNRTSFDSDSWTXRLHNLQIKDKGLYQCIIHHKKPTGMIRIHQMNSELSVL (SEQ ID NO:433), where X is any amino acid other than Leu. In some cases, X is Ala;

[0438] APLKIQAYFNETADLPCQFANSQNQSLSELVVFWQDQENLVLNEVYLGKEKFDS VHSKXMNRTSFDSDSWTLRLHNLQIKDKGLYQCIIHHKKPTGMIRIHQMNSELSVLANFSQPEIV PISNITENVYINLTCSSIHGYPEPKKMSVLLRTKNSTIEYDGIMQKSQDNVTELYDVSISLSVSFPD VTSNMTIFCILETDKTRLLSSPFSIELEDPQPPPDHIP (SEQ ID NO:434), where X is any amino acid other than Tyr. In some cases, X is Ala;

[0439] APLKIQAYFNETADLPCQFANSQNQSLSELVVFWQDQENLVLNEVYLGKEKFDS VHSKXMNRTSFDSDSWTLRLHNLQIKDKGLYQCIIHHKKPTGMIRIHQMNSELSVL (SEQ ID NO:435), where X is any amino acid other than Tyr. In some cases, X is Ala;

[0440] APLKIQAYFNETADLPCQFANSQNQSLSELVVFWQDQENLVLNEVYLGKEKFDS VHSKYMXRTSFDSDSWTLRLHNLQIKDKGLYQCIIHXKKPTGMIRIHQMNSELSVLANFSQPEIV PISNITENVYINLTCSSIHGYPEPKKMSVLLRTKNSTIEYDGIMQKSQDNVTELYDVSISLSVSFPD VTSNMTIFCILETDKTRLLSSPFSIELEDPQPPPDHIP (SEQ ID NO:436), where the first X is any amino acid other than Asn and the second X is any amino acid other than His. In some cases, the first and the second X are both Ala;

[0441] APLKIQAYFNETADLPCQFANSQNQSLSELVVFWQDQENLVLNEVYLGKEKFDS VHSKYMXRTSFDSDSWTLRLHNLQIKDKGLYQCIIHXKKPTGMIRIHQMNSELSVL (SEQ ID NO:437), where the first X is any amino acid other than Asn and the second X is any amino acid other than His. In some cases, the first and the second X are both Ala;

[0442] APLKIQAYFNETADLPCQFANSQNQSLSELVVFWQDQENLVLNEVYLGKEKFDS VHSKYMNRTSFX₁SDSWTLRLHNLQIKDKGLYQCIIHX₂KKPTGMIRIHQMNSELSVLANFSQPEI VPISNITENVYINLTCSSIHGYPEPKKMSVLLRTKNSTIEYDGIMQKSQDNVTELYDVSISLSVSFP DVTSNMTIFCILETDKTRLLSSPFSIELEDPQPPPDHIP (SEQ ID NO:438), where X₁ is any amino acid other than Asp, and X₂ is any amino acid other than His. In some cases, X₁ is Ala and X₂ is Ala;

[0443] APLKIQAYFNETADLPCQFANSQNQSLSELVVFWQDQENLVLNEVYLGKEKFDS VHSKYMNRTSFX₁SDSWTLRLHNLQIKDKGLYQCIIHX₂KKPTGMIRIHQMNSELSVL (SEQ ID NO:439), where the first X is any amino acid other than Asn and the second X is any amino acid other than His. In some cases, the first and the second X are both Ala;

[0444] APLKIQAYFNETADLPCQFANSQNQSLSELVVFWQDQENLVLNEVYLGKEKFDS VHSKYMX₁RTSFX₂SDSWTLRLHNLQIKDKGLYQCIIHX₃KKPTGMIRIHQMNSELSVLANFSQPE IVPISNITENVYINLTCSSIHGYPEPKKMSVLLRTKNSTIEYDGIMQKSQDNVTELYDVSISLSVSFP DVTSNMTIFCILETDKTRLLSSPFSIELEDPQPPPDHIP (SEQ ID NO:440), where X₁ is any amino acid other than Asn, X₂ is any amino acid other than Asp, and X₃ is any amino acid other than His. In some cases, X₁ is Ala, X₂ is Ala, and X₃ is Ala; and

[0445] APLKIQAYFNETADLPCQFANSQNQSLSELVVFWQDQENLVLNEVYLGKEKFDS VHSKYMX₁RTSFX₂SDSWTLRLHNLQIKDKGLYQCIIHX₃KKPTGMIRIHQMNSELSVL (SEQ ID NO:441), where X₁ is any amino acid other than Asn, X₂ is any amino acid other than Asp, and X₃ is any amino acid other than His. In some cases, X₁ is Ala, X₂ is Ala, and X₃ is Ala.

### 4-1BBL Variants

[0446] In some cases, a variant immunomodulatory polypeptide present in a TMMP of the present disclosure is a variant 4-1BBL polypeptide. Wild-type 4-1BBL binds to 4-1BB (CD137).

[0447] A wild-type 4-1BBL amino acid sequence can be as follows:

(SEQ ID NO: 10)
MEYASDASLD PEAPWPPAPR ARACRVLPWA LVAGLLLLLL
LAAACAVFLA CPWAVSGARA SPGSAASPRL REGPELSPDD
PAGLLDLRQG MFAQLVAQNV LLIDGPLSWY SDPGLAGVSL
TGGLSYKEDT KELVVAKAGV YYVFFQLELR RVVAGEGSGS
VSLALHLQPL RSAAGAAALA LTVDLPPASS EARNSAFGFQ
GRLLHLSAGQ RLGVHLHTEA RARHAWQLTQ GATVLGLFRV
TPEIPAGLPS PRSE.

[0448] In some cases, a variant 4-1BBL polypeptide is a variant of the tumor necrosis factor (TNF) homology domain (THD) of human 4-1BBL.

[0449] A wild-type amino acid sequence of the THD of human 4-1BBL can be, e.g., one of SEQ ID NOs:11-13, as follows:

(SEQ ID NO: 11)
PAGLLDLRQG MFAQLVAQNV LLIDGPLSWY SDPGLAGVSL
TGGLSYKEDT KELVVAKAGV YYVFFQLELR RVVAGEGSGS
VSLALHLQPL RSAAGAAALA LTVDLPPASS EARNSAFGFQ
GRLLHLSAGQ RLGVHLHTEA RARHAWQLTQ GATVLGLFRV
TPEIPAGLPS PRSE.
(SEQ ID NO: 12)
D PAGLLDLRQG MFAQLVAQNV LLIDGPLSWY
SDPGLAGVSL TGGLSYKEDT KELVVAKAGV YYVFFQLELR
RVVAGEGSGS VSLALHLQPL RSAAGAAALA LTVDLPPASS
EARNSAFGFQ GRLLHLSAGQ RLGVHLHTEA RARHAWQLTQ
GATVLGLFRV TPEIPAGLPS PRSE.
(SEQ ID NO: 13)
D PAGLLDLRQG MFAQLVAQNV LLIDGPLSWY
SDPGLAGVSL TGGLSYKEDT KELVVAKAGV YYVFFQLELR
RVVAGEGSGS VSLALHLQPL RSAAGAAALA LTVDLPPASS
EARNSAFGFQ GRLLHLSAGQ RLGVHLHTEA RARHAWQLTQ
GATVLGLFRV TPEIPA.

[0450] A wild-type 4-1BB amino acid sequence can be as follows: MGNSCYNIVA TLLLVLNFER TRSLQDPCSN CPAGTFCDNN RNQICSPCPP NSFSSAGGQR TCDICRQCKG VFRTRKECSS TSNAECDCTP GFHCLGAGCS MCEQDCKQGQ ELTKKGCKDC CFGTFNDQKR GICRPWTNCS LDGKSVLVNG TKERDVVCGP SPADLSPGAS SVTPPAPARE PGHSPQIISF FLALTSTALL FLLFFLTLRF SVVKRGRKKL LYIFKQPFMR PVQTTQEEDG CSCRFPEEEE GGCEL (SEQ ID NO:14). In some cases, where a TMMP of the present disclosure comprises a variant 4-1BBL polypeptide, a “cognate co-immunomodulatory polypeptide” is a 4-1BB polypeptide comprising the amino acid sequence of SEQ ID NO:14.

[0451] In some cases, a variant 4-1BBL polypeptide exhibits reduced binding affinity to 4-1BB, compared to the binding affinity of a 4-1BBL polypeptide comprising the amino acid sequence set forth in one of SEQ ID NOs:10-13. For example, in some cases, a variant 4-1BBL polypeptide of the present disclosure binds 4-1BB with a binding affinity that is at least 10% less, at least 15% less, at least 20% less, at least 25%, at least 30% less, at least 35% less, at least 40% less, at least 45% less, at least 50% less, at least 55% less, at least 60% less, at least 65% less, at least 70% less, at least 75% less, at least 80% less, at least 85% less, at least 90% less, at least 95% less, or more than 95% less, than the binding affinity of a 4-1BBL polypeptide comprising the amino acid sequence set forth in one of SEQ ID NOs:10-13 for a 4-1BB polypeptide (e.g., a 4-1BB polypeptide comprising the amino acid sequence set forth in SEQ ID NO:14), when assayed under the same conditions.

[0452] In some cases, a variant 4-1BBL polypeptide has a binding affinity to 4-1BB that is from 100 nM to 100 μM. As another example, in some cases, a variant 4-1BBL polypeptide has a binding affinity for 4-1BB (e.g., a 4-1BB polypeptide comprising the amino acid sequence set forth in SEQ ID NO:14) that is from about 100 nM to 150 nM, from about 150 nM to about 200 nM, from about 200 nM to about 250 nM, from about 250 nM to about 300 nM, from about 300 nM to about 350 nM, from about 350 nM to about 400 nM, from about 400 nM to about 500 nM, from about 500 nM to about 600 nM, from about 600 nM to about 700 nM, from about 700 nM to about 800 nM, from about 800 nM to about 900 nM, from about 900 nM to about 1 μM, to about 1 μM to about 5 μM, from about 5 μM to about 10 μM, from about 10 μM to about 15 μM, from about 15 μM to about 20 μM, from about 20 μM to about M, from about 25 μM to about 50 μM, from about 50 μM to about 75 μM, or from about 75 μM to about 100 μM.

[0453] In some cases, a variant 4-1BBL polypeptide has a single amino acid substitution compared to the 4-1BBL amino acid sequence set forth in one of SEQ ID NOs:10-13. In some cases, a variant 4-1BBL polypeptide has from 2 to 10 amino acid substitutions compared to the 4-1BBL amino acid sequence set forth in one of SEQ ID NOs:10-13. In some cases, a variant 4-1BBL polypeptide has 2 amino acid substitutions compared to the 4-1BBL amino acid sequence set forth in one of SEQ ID NOs:10-13. In some cases, a variant 4-1BBL polypeptide has 3 amino acid substitutions compared to the 4-1BBL amino acid sequence set forth in one of SEQ ID NOs:10-13. In some cases, a variant 4-1BBL polypeptide has 4 amino acid substitutions compared to the 4-1BBL amino acid sequence set forth in one of SEQ ID NOs:10-13. In some cases, a variant 4-1BBL polypeptide has 5 amino acid substitutions compared to the 4-1BBL amino acid sequence set forth in one of SEQ ID NOs:10-13. In some cases, a variant 4-1BBL polypeptide has 6 amino acid substitutions compared to the 4-1BBL amino acid sequence set forth in one of SEQ ID NOs:10-13. In some cases, a variant 4-1BBL polypeptide has 7 amino acid substitutions compared to the 4-1BBL amino acid sequence set forth in one of SEQ ID NOs:10-13. In some cases, a variant 4-1BBL polypeptide has 8 amino acid substitutions compared to the 4-1BBL amino acid sequence set forth in one of SEQ ID NOs:10-13. In some cases, a variant 4-1BBL polypeptide has 9 amino acid substitutions compared to the 4-1BBL amino acid sequence set forth in one of SEQ ID NOs:10-13. In some cases, a variant 4-1BBL polypeptide has 10 amino acid substitutions compared to the 4-1BBL amino acid sequence set forth in one of SEQ ID NOs:10-13.

[0454] Suitable 4-1BBL variants include a polypeptide that comprises an amino acid sequence having at least 90%, at least 95%, at least 98%, at least 99%, or 100%, amino acid sequence identity to any one of the following amino acid sequences:

[0455] PAGLLDLRQG MFAQLVAQNV LLIDGPLSWY SDPGLAGVSL TGGLSYXEDT KELVVAKAGV YYVFFQLELR RVVAGEGSGS VSLALHLQPL RSAAGAAALA LTVDLPPASS EARNSAFGFQ GRLLHLSAGQ RLGVHLHTEA RARHAWQLTQ GATVLGLFRV TPEIPAGLPS PRSE (SEQ ID NO:442), where X is any amino acid other than Lys. In some cases, X is Ala;

[0456] PAGLLDLRQG MFAQLVAQNV LLIDGPLSWY SDPGLAGVSL TGGLSYKEDT KELVVAKAGV YYVFFQLELR RVVAGEGSGS VSLALHLQPL RSAAGAAALA LTVDLPPASS EARNSAFGFQ GRLLHLSAGQ RLGVHLHTEA RARHAWXLTQ GATVLGLFRV TPEIPAGLPS PRSE (SEQ ID NO:443), where X is any amino acid other than Gln. In some cases, X is Ala;

[0457] PAGLLDLRQG XFAQLVAQNV LLIDGPLSWY SDPGLAGVSL TGGLSYKEDT KELVVAKAGV YYVFFQLELR RVVAGEGSGS VSLALHLQPL RSAAGAAALA LTVDLPPASS EARNSAFGFQ GRLLHLSAGQ RLGVHLHTEA RARHAWQLTQ GATVLGLFRV TPEIPAGLPS PRSE (SEQ ID NO:444), where X is any amino acid other than Met. In some cases, X is Ala;

[0458] PAGLLDLRQG MXAQLVAQNV LLIDGPLSWY SDPGLAGVSL TGGLSYKEDT KELVVAKAGV YYVFFQLELR RVVAGEGSGS VSLALHLQPL RSAAGAAALA LTVDLPPASS EARNSAFGFQ GRLLHLSAGQ RLGVHLHTEA RARHAWQLTQ GATVLGLFRV TPEIPAGLPS PRSE (SEQ ID NO:445), where X is any amino acid other than Phe. In some cases, X is Ala;

[0459] PAGLLDLRQG MFAXLVAQNV LLIDGPLSWY SDPGLAGVSL TGGLSYKEDT KELVVAKAGV YYVFFQLELR RVVAGEGSGS VSLALHLQPL RSAAGAAALA LTVDLPPASS EARNSAFGFQ GRLLHLSAGQ RLGVHLHTEA RARHAWQLTQ GATVLGLFRV TPEIPAGLPS PRSE (SEQ ID NO:446), where X is any amino acid other than Gln. In some cases, X is Ala;

[0460] PAGLLDLRQG MFAQXVAQNV LLIDGPLSWY SDPGLAGVSL TGGLSYKEDT KELVVAKAGV YYVFFQLELR RVVAGEGSGS VSLALHLQPL RSAAGAAALA LTVDLPPASS EARNSAFGFQ GRLLHLSAGQ RLGVHLHTEA RARHAWQLTQ GATVLGLFRV TPEIPAGLPS PRSE (SEQ ID NO:447), where X is any amino acid other than Leu. In some cases, X is Ala;

[0461] PAGLLDLRQG MFAQLXAQNV LLIDGPLSWY SDPGLAGVSL TGGLSYKEDT KELVVAKAGV YYVFFQLELR RVVAGEGSGS VSLALHLQPL RSAAGAAALA LTVDLPPASS EARNSAFGFQ GRLLHLSAGQ RLGVHLHTEA RARHAWQLTQ GATVLGLFRV TPEIPAGLPS PRSE (SEQ ID NO:448), where X is any amino acid other than Val. In some cases, X is Ala;

[0462] PAGLLDLRQG MFAQLVAXNV LLIDGPLSWY SDPGLAGVSL TGGLSYKEDT KELVVAKAGV YYVFFQLELR RVVAGEGSGS VSLALHLQPL RSAAGAAALA LTVDLPPASS EARNSAFGFQ GRLLHLSAGQ RLGVHLHTEA RARHAWQLTQ GATVLGLFRV TPEIPAGLPS PRSE (SEQ ID NO:449), where X is any amino acid other than Gln. In some cases, X is Ala;

[0463] PAGLLDLRQG MFAQLVAQXV LLIDGPLSWY SDPGLAGVSL TGGLSYKEDT KELVVAKAGV YYVFFQLELR RVVAGEGSGS VSLALHLQPL RSAAGAAALA LTVDLPPASS EARNSAFGFQ GRLLHLSAGQ RLGVHLHTEA RARHAWQLTQ GATVLGLFRV TPEIPAGLPS PRSE (SEQ ID NO:450), where X is any amino acid other than Asn. In some cases, X is Ala;

[0464] PAGLLDLRQG MFAQLVAQNX LLIDGPLSWY SDPGLAGVSL TGGLSYKEDT KELVVAKAGV YYVFFQLELR RVVAGEGSGS VSLALHLQPL RSAAGAAALA LTVDLPPASS EARNSAFGFQ GRLLHLSAGQ RLGVHLHTEA RARHAWQLTQ GATVLGLFRV TPEIPAGLPS PRSE (SEQ ID NO:451), where X is any amino acid other than Val. In some cases, X is Ala;

[0465] PAGLLDLRQG MFAQLVAQNV XLIDGPLSWY SDPGLAGVSL TGGLSYKEDT KELVVAKAGV YYVFFQLELR RVVAGEGSGS VSLALHLQPL RSAAGAAALA LTVDLPPASS EARNSAFGFQ GRLLHLSAGQ RLGVHLHTEA RARHAWQLTQ GATVLGLFRV TPEIPAGLPS PRSE (SEQ ID NO:452), where X is any amino acid other than Leu. In some cases, X is Ala;

[0466] PAGLLDLRQG MFAQLVAQNV LXIDGPLSWY SDPGLAGVSL TGGLSYKEDT KELVVAKAGV YYVFFQLELR RVVAGEGSGS VSLALHLQPL RSAAGAAALA LTVDLPPASS EARNSAFGFQ GRLLHLSAGQ RLGVHLHTEA RARHAWQLTQ GATVLGLFRV TPEIPAGLPS PRSE (SEQ ID NO:453), where X is any amino acid other than Leu. In some cases, X is Ala;

[0467] PAGLLDLRQG MFAQLVAQNV LLXDGPLSWY SDPGLAGVSL TGGLSYKEDT KELVVAKAGV YYVFFQLELR RVVAGEGSGS VSLALHLQPL RSAAGAAALA LTVDLPPASS EARNSAFGFQ GRLLHLSAGQ RLGVHLHTEA RARHAWQLTQ GATVLGLFRV TPEIPAGLPS PRSE (SEQ ID NO:454), where X is any amino acid other than Ile. In some cases, X is Ala;

[0468] PAGLLDLRQG MFAQLVAQNV LLIXGPLSWY SDPGLAGVSL TGGLSYKEDT KELVVAKAGV YYVFFQLELR RVVAGEGSGS VSLALHLQPL RSAAGAAALA LTVDLPPASS EARNSAFGFQ GRLLHLSAGQ RLGVHLHTEA RARHAWQLTQ GATVLGLFRV TPEIPAGLPS PRSE (SEQ ID NO:455), where X is any amino acid other than Asp. In some cases, X is Ala;

[0469] PAGLLDLRQG MFAQLVAQNV LLIDXPLSWY SDPGLAGVSL TGGLSYKEDT KELVVAKAGV YYVFFQLELR RVVAGEGSGS VSLALHLQPL RSAAGAAALA LTVDLPPASS EARNSAFGFQ GRLLHLSAGQ RLGVHLHTEA RARHAWQLTQ GATVLGLFRV TPEIPAGLPS PRSE (SEQ ID NO:456), where X is any amino acid other than Gly. In some cases, X is Ala;

[0470] PAGLLDLRQG MFAQLVAQNV LLIDGXLSWY SDPGLAGVSL TGGLSYKEDT KELVVAKAGV YYVFFQLELR RVVAGEGSGS VSLALHLQPL RSAAGAAALA LTVDLPPASS EARNSAFGFQ GRLLHLSAGQ RLGVHLHTEA RARHAWQLTQ GATVLGLFRV TPEIPAGLPS PRSE (SEQ ID NO:457), where X is any amino acid other than Pro. In some cases, X is Ala;

[0471] PAGLLDLRQG MFAQLVAQNV LLIDGPXSWY SDPGLAGVSL TGGLSYKEDT KELVVAKAGV YYVFFQLELR RVVAGEGSGS VSLALHLQPL RSAAGAAALA LTVDLPPASS EARNSAFGFQ GRLLHLSAGQ RLGVHLHTEA RARHAWQLTQ GATVLGLFRV TPEIPAGLPS PRSE (SEQ ID NO:458), where X is any amino acid other than Leu. In some cases, X is Ala;

[0472] PAGLLDLRQG MFAQLVAQNV LLIDGPLXWY SDPGLAGVSL TGGLSYKEDT KELVVAKAGV YYVFFQLELR RVVAGEGSGS VSLALHLQPL RSAAGAAALA LTVDLPPASS EARNSAFGFQ GRLLHLSAGQ RLGVHLHTEA RARHAWQLTQ GATVLGLFRV TPEIPAGLPS PRSE (SEQ ID NO:459), where X is any amino acid other than Ser. In some cases, X is Ala;

[0473] PAGLLDLRQG MFAQLVAQNV LLIDGPLSXY SDPGLAGVSL TGGLSYKEDT KELVVAKAGV YYVFFQLELR RVVAGEGSGS VSLALHLQPL RSAAGAAALA LTVDLPPASS EARNSAFGFQ GRLLHLSAGQ RLGVHLHTEA RARHAWQLTQ GATVLGLFRV TPEIPAGLPS PRSE (SEQ ID NO:460), where X is any amino acid other than Trp. In some cases, X is Ala;

[0474] PAGLLDLRQG MFAQLVAQNV LLIDGPLSWXSDPGLAGVSL TGGLSYKEDT KELVVAKAGV YYVFFQLELR RVVAGEGSGS VSLALHLQPL RSAAGAAALA LTVDLPPASS EARNSAFGFQ GRLLHLSAGQ RLGVHLHTEA RARHAWQLTQ GATVLGLFRV TPEIPAGLPS PRSE (SEQ ID NO:461), where X is any amino acid other than Tyr. In some cases, X is Ala;

[0475] PAGLLDLRQG MFAQLVAQNV LLIDGPLSWY XDPGLAGVSL TGGLSYKEDT KELVVAKAGV YYVFFQLELR RVVAGEGSGS VSLALHLQPL RSAAGAAALA LTVDLPPASS EARNSAFGFQ GRLLHLSAGQ RLGVHLHTEA RARHAWQLTQ GATVLGLFRV TPEIPAGLPS PRSE (SEQ ID NO:462), where X is any amino acid other than Ser. In some cases, X is Ala;

[0476] PAGLLDLRQG MFAQLVAQNV LLIDGPLSWY SXPGLAGVSL TGGLSYKEDT KELVVAKAGV YYVFFQLELR RVVAGEGSGS VSLALHLQPL RSAAGAAALA LTVDLPPASS EARNSAFGFQ GRLLHLSAGQ RLGVHLHTEA RARHAWQLTQ GATVLGLFRV TPEIPAGLPS PRSE (SEQ ID NO:463), where X is any amino acid other than Asp. In some cases, X is Ala;

[0477] PAGLLDLRQG MFAQLVAQNV LLIDGPLSWY SDXGLAGVSL TGGLSYKEDT KELVVAKAGV YYVFFQLELR RVVAGEGSGS VSLALHLQPL RSAAGAAALA LTVDLPPASS EARNSAFGFQ GRLLHLSAGQ RLGVHLHTEA RARHAWQLTQ GATVLGLFRV TPEIPAGLPS PRSE (SEQ ID NO:464), where X is any amino acid other than Pro. In some cases, X is Ala;

[0478] PAGLLDLRQG MFAQLVAQNV LLIDGPLSWY SDPXLAGVSL TGGLSYKEDT KELVVAKAGV YYVFFQLELR RVVAGEGSGS VSLALHLQPL RSAAGAAALA LTVDLPPASS EARNSAFGFQ GRLLHLSAGQ RLGVHLHTEA RARHAWQLTQ GATVLGLFRV TPEIPAGLPS PRSE (SEQ ID NO:465), where X is any amino acid other than Gly. In some cases, X is Ala;

[0479] PAGLLDLRQG MFAQLVAQNV LLIDGPLSWY SDPGXAGVSL TGGLSYKEDT KELVVAKAGV YYVFFQLELR RVVAGEGSGS VSLALHLQPL RSAAGAAALA LTVDLPPASS EARNSAFGFQ GRLLHLSAGQ RLGVHLHTEA RARHAWQLTQ GATVLGLFRV TPEIPAGLPS PRSE (SEQ ID NO:466), where X is any amino acid other than Leu. In some cases, X is Ala;

[0480] PAGLLDLRQG MFAQLVAQNV LLIDGPLSWY SDPGLAXVSL TGGLSYKEDT KELVVAKAGV YYVFFQLELR RVVAGEGSGS VSLALHLQPL RSAAGAAALA LTVDLPPASS EARNSAFGFQ GRLLHLSAGQ RLGVHLHTEA RARHAWQLTQ GATVLGLFRV TPEIPAGLPS PRSE (SEQ ID NO:467), where X is any amino acid other than Gly. In some cases, X is Ala;

[0481] PAGLLDLRQG MFAQLVAQNV LLIDGPLSWY SDPGLAGXSL TGGLSYKEDT KELVVAKAGV YYVFFQLELR RVVAGEGSGS VSLALHLQPL RSAAGAAALA LTVDLPPASS EARNSAFGFQ GRLLHLSAGQ RLGVHLHTEA RARHAWQLTQ GATVLGLFRV TPEIPAGLPS PRSE (SEQ ID NO:468), where X is any amino acid other than Val. In some cases, X is Ala;

[0482] PAGLLDLRQG MFAQLVAQNV LLIDGPLSWY SDPGLAGVXL TGGLSYKEDT KELVVAKAGV YYVFFQLELR RVVAGEGSGS VSLALHLQPL RSAAGAAALA LTVDLPPASS EARNSAFGFQ GRLLHLSAGQ RLGVHLHTEA RARHAWQLTQ GATVLGLFRV TPEIPAGLPS PRSE (SEQ ID NO:469), where X is any amino acid other than Ser. In some cases, X is Ala;

[0483] PAGLLDLRQG MFAQLVAQNV LLIDGPLSWY SDPGLAGVSX TGGLSYKEDT KELVVAKAGV YYVFFQLELR RVVAGEGSGS VSLALHLQPL RSAAGAAALA LTVDLPPASS EARNSAFGFQ GRLLHLSAGQ RLGVHLHTEA RARHAWQLTQ GATVLGLFRV TPEIPAGLPS PRSE (SEQ ID NO:470), where X is any amino acid other than Leu. In some cases, X is Ala;

[0484] PAGLLDLRQG MFAQLVAQNV LLIDGPLSWY SDPGLAGVSL XGGLSYKEDT KELVVAKAGV YYVFFQLELR RVVAGEGSGS VSLALHLQPL RSAAGAAALA LTVDLPPASS EARNSAFGFQ GRLLHLSAGQ RLGVHLHTEA RARHAWQLTQ GATVLGLFRV TPEIPAGLPS PRSE (SEQ ID NO:471), where X is any amino acid other than Thr. In some cases, X is Ala;

[0485] PAGLLDLRQG MFAQLVAQNV LLIDGPLSWY SDPGLAGVSL TXGLSYKEDT KELVVAKAGV YYVFFQLELR RVVAGEGSGS VSLALHLQPL RSAAGAAALA LTVDLPPASS EARNSAFGFQ GRLLHLSAGQ RLGVHLHTEA RARHAWQLTQ GATVLGLFRV TPEIPAGLPS PRSE (SEQ ID NO:472), where X is any amino acid other than Gly. In some cases, X is Ala;

[0486] PAGLLDLRQG MFAQLVAQNV LLIDGPLSWY SDPGLAGVSL TGXLSYKEDT KELVVAKAGV YYVFFQLELR RVVAGEGSGS VSLALHLQPL RSAAGAAALA LTVDLPPASS EARNSAFGFQ GRLLHLSAGQ RLGVHLHTEA RARHAWQLTQ GATVLGLFRV TPEIPAGLPS PRSE (SEQ ID NO:473), where X is any amino acid other than Gly. In some cases, X is Ala;

[0487] PAGLLDLRQG MFAQLVAQNV LLIDGPLSWY SDPGLAGVSL TGGXSYKEDT KELVVAKAGV YYVFFQLELR RVVAGEGSGS VSLALHLQPL RSAAGAAALA LTVDLPPASS EARNSAFGFQ GRLLHLSAGQ RLGVHLHTEA RARHAWQLTQ GATVLGLFRV TPEIPAGLPS PRSE (SEQ ID NO:474), where X is any amino acid other than Leu. In some cases, X is Ala;

[0488] PAGLLDLRQG MFAQLVAQNV LLIDGPLSWY SDPGLAGVSL TGGLXYKEDT KELVVAKAGV YYVFFQLELR RVVAGEGSGS VSLALHLQPL RSAAGAAALA LTVDLPPASS EARNSAFGFQ GRLLHLSAGQ RLGVHLHTEA RARHAWQLTQ GATVLGLFRV TPEIPAGLPS PRSE (SEQ ID NO:475), where X is any amino acid other than Ser. In some cases, X is Ala;

[0489] PAGLLDLRQG MFAQLVAQNV LLIDGPLSWY SDPGLAGVSL TGGLSXKEDT KELVVAKAGV YYVFFQLELR RVVAGEGSGS VSLALHLQPL RSAAGAAALA LTVDLPPASS EARNSAFGFQ GRLLHLSAGQ RLGVHLHTEA RARHAWQLTQ GATVLGLFRV TPEIPAGLPS PRSE (SEQ ID NO:476), where X is any amino acid other than Tyr. In some cases, X is Ala;

[0490] PAGLLDLRQG MFAQLVAQNV LLIDGPLSWY SDPGLAGVSL TGGLSYKXDT KELVVAKAGV YYVFFQLELR RVVAGEGSGS VSLALHLQPL RSAAGAAALA LTVDLPPASS EARNSAFGFQ GRLLHLSAGQ RLGVHLHTEA RARHAWQLTQ GATVLGLFRV TPEIPAGLPS PRSE (SEQ ID NO:477), where X is any amino acid other than Glu. In some cases, X is Ala;

[0491] PAGLLDLRQG MFAQLVAQNV LLIDGPLSWY SDPGLAGVSL TGGLSYKEXT KELVVAKAGV YYVFFQLELR RVVAGEGSGS VSLALHLQPL RSAAGAAALA LTVDLPPASS EARNSAFGFQ GRLLHLSAGQ RLGVHLHTEA RARHAWQLTQ GATVLGLFRV TPEIPAGLPS PRSE (SEQ ID NO:478), where X is any amino acid other than Asp. In some cases, X is Ala;

[0492] PAGLLDLRQG MFAQLVAQNV LLIDGPLSWY SDPGLAGVSL TGGLSYKEDX KELVVAKAGV YYVFFQLELR RVVAGEGSGS VSLALHLQPL RSAAGAAALA LTVDLPPASS EARNSAFGFQ GRLLHLSAGQ RLGVHLHTEA RARHAWQLTQ GATVLGLFRV TPEIPAGLPS PRSE (SEQ ID NO:479), where X is any amino acid other than Thr. In some cases, X is Ala;

[0493] PAGLLDLRQG MFAQLVAQNV LLIDGPLSWY SDPGLAGVSL TGGLSYKEDT XELVVAKAGV YYVFFQLELR RVVAGEGSGS VSLALHLQPL RSAAGAAALA LTVDLPPASS EARNSAFGFQ GRLLHLSAGQ RLGVHLHTEA RARHAWQLTQ GATVLGLFRV TPEIPAGLPS PRSE (SEQ ID NO:480), where X is any amino acid other than Lys. In some cases, X is Ala;

[0494] PAGLLDLRQG MFAQLVAQNV LLIDGPLSWY SDPGLAGVSL TGGLSYKEDT KXLVVAKAGV YYVFFQLELR RVVAGEGSGS VSLALHLQPL RSAAGAAALA LTVDLPPASS EARNSAFGFQ GRLLHLSAGQ RLGVHLHTEA RARHAWQLTQ GATVLGLFRV TPEIPAGLPS PRSE (SEQ ID NO:481), where X is any amino acid other than Glu. In some cases, X is Ala;

[0495] PAGLLDLRQG MFAQLVAQNV LLIDGPLSWY SDPGLAGVSL TGGLSYKEDT KELVVAKAGV YYVXFQLELR RVVAGEGSGS VSLALHLQPL RSAAGAAALA LTVDLPPASS EARNSAFGFQ GRLLHLSAGQ RLGVHLHTEA RARHAWQLTQ GATVLGLFRV TPEIPAGLPS PRSE (SEQ ID NO:482), where X is any amino acid other than Phe. In some cases, X is Ala;

[0496] PAGLLDLRQG MFAQLVAQNV LLIDGPLSWY SDPGLAGVSL TGGLSYKEDT KELVVAKAGV YYVFXQLELR RVVAGEGSGS VSLALHLQPL RSAAGAAALA LTVDLPPASS EARNSAFGFQ GRLLHLSAGQ RLGVHLHTEA RARHAWQLTQ GATVLGLFRV TPEIPAGLPS PRSE (SEQ ID NO:483), where X is any amino acid other than Phe. In some cases, X is Ala;

[0497] PAGLLDLRQG MFAQLVAQNV LLIDGPLSWY SDPGLAGVSL TGGLSYKEDT KELVVAKAGV YYVFFXLELR RVVAGEGSGS VSLALHLQPL RSAAGAAALA LTVDLPPASS EARNSAFGFQ GRLLHLSAGQ RLGVHLHTEA RARHAWQLTQ GATVLGLFRV TPEIPAGLPS PRSE (SEQ ID NO:484), where X is any amino acid other than Gln. In some cases, X is Ala;

[0498] PAGLLDLRQG MFAQLVAQNV LLIDGPLSWY SDPGLAGVSL TGGLSYKEDT KELVVAKAGV YYVFFQXELR RVVAGEGSGS VSLALHLQPL RSAAGAAALA LTVDLPPASS EARNSAFGFQ GRLLHLSAGQ RLGVHLHTEA RARHAWQLTQ GATVLGLFRV TPEIPAGLPS PRSE (SEQ ID NO:485), where X is any amino acid other than Leu. In some cases, X is Ala;

[0499] PAGLLDLRQG MFAQLVAQNV LLIDGPLSWY SDPGLAGVSL TGGLSYKEDT KELVVAKAGV YYVFFQLXLR RVVAGEGSGS VSLALHLQPL RSAAGAAALA LTVDLPPASS EARNSAFGFQ GRLLHLSAGQ RLGVHLHTEA RARHAWQLTQ GATVLGLFRV TPEIPAGLPS PRSE (SEQ ID NO:486), where X is any amino acid other than Glu. In some cases, X is Ala;

[0500] PAGLLDLRQG MFAQLVAQNV LLIDGPLSWY SDPGLAGVSL TGGLSYKEDT KELVVAKAGV YYVFFQLEXR RVVAGEGSGS VSLALHLQPL RSAAGAAALA LTVDLPPASS EARNSAFGFQ GRLLHLSAGQ RLGVHLHTEA RARHAWQLTQ GATVLGLFRV TPEIPAGLPS PRSE (SEQ ID NO:487), where X is any amino acid other than Leu. In some cases, X is Ala;

[0501] PAGLLDLRQG MFAQLVAQNV LLIDGPLSWY SDPGLAGVSL TGGLSYKEDT KELVVAKAGV YYVFFQLELX RVVAGEGSGS VSLALHLQPL RSAAGAAALA LTVDLPPASS EARNSAFGFQ GRLLHLSAGQ RLGVHLHTEA RARHAWQLTQ GATVLGLFRV TPEIPAGLPS PRSE (SEQ ID NO:488), where X is any amino acid other than Arg. In some cases, X is Ala;

[0502] PAGLLDLRQG MFAQLVAQNV LLIDGPLSWY SDPGLAGVSL TGGLSYKEDT KELVVAKAGV YYVFFQLELR XVVAGEGSGS VSLALHLQPL RSAAGAAALA LTVDLPPASS EARNSAFGFQ GRLLHLSAGQ RLGVHLHTEA RARHAWQLTQ GATVLGLFRV TPEIPAGLPS PRSE (SEQ ID NO:489), where X is any amino acid other than Arg. In some cases, X is Ala;

[0503] PAGLLDLRQG MFAQLVAQNV LLIDGPLSWY SDPGLAGVSL TGGLSYKEDT KELVVAKAGV YYVFFQLELR RXVAGEGSGS VSLALHLQPL RSAAGAAALA LTVDLPPASS EARNSAFGFQ GRLLHLSAGQ RLGVHLHTEA RARHAWQLTQ GATVLGLFRV TPEIPAGLPS PRSE (SEQ ID NO:490), where X is any amino acid other than Val. In some cases, X is Ala;

[0504] PAGLLDLRQG MFAQLVAQNV LLIDGPLSWY SDPGLAGVSL TGGLSYKEDT KELVVAKAGV YYVFFQLELR RVXAGEGSGS VSLALHLQPL RSAAGAAALA LTVDLPPASS EARNSAFGFQ GRLLHLSAGQ RLGVHLHTEA RARHAWQLTQ GATVLGLFRV TPEIPAGLPS PRSE (SEQ ID NO:491), where X is any amino acid other than Val. In some cases, X is Ala;

[0505] PAGLLDLRQG MFAQLVAQNV LLIDGPLSWY SDPGLAGVSL TGGLSYKEDT KELVVAKAGV YYVFFQLELR RVVAXEGSGS VSLALHLQPL RSAAGAAALA LTVDLPPASS EARNSAFGFQ GRLLHLSAGQ RLGVHLHTEA RARHAWQLTQ GATVLGLFRV TPEIPAGLPS PRSE (SEQ ID NO:492), where X is any amino acid other than Gly. In some cases, X is Ala;

[0506] PAGLLDLRQG MFAQLVAQNV LLIDGPLSWY SDPGLAGVSL TGGLSYKEDT KELVVAKAGV YYVFFQLELR RVVAGXGSGS VSLALHLQPL RSAAGAAALA LTVDLPPASS EARNSAFGFQ GRLLHLSAGQ RLGVHLHTEA RARHAWQLTQ GATVLGLFRV TPEIPAGLPS PRSE (SEQ ID NO:493), where X is any amino acid other than Glu. In some cases, X is Ala;

[0507] PAGLLDLRQG MFAQLVAQNV LLIDGPLSWY SDPGLAGVSL TGGLSYKEDT KELVVAKAGV YYVFFQLELR RVVAGEXSGS VSLALHLQPL RSAAGAAALA LTVDLPPASS EARNSAFGFQ GRLLHLSAGQ RLGVHLHTEA RARHAWQLTQ GATVLGLFRV TPEIPAGLPS PRSE (SEQ ID NO:494), where X is any amino acid other than Gly. In some cases, X is Ala;

[0508] PAGLLDLRQG MFAQLVAQNV LLIDGPLSWY SDPGLAGVSL TGGLSYKEDT KELVVAKAGV YYVFFQLELR RVVAGEGXGS VSLALHLQPL RSAAGAAALA LTVDLPPASS EARNSAFGFQ GRLLHLSAGQ RLGVHLHTEA RARHAWQLTQ GATVLGLFRV TPEIPAGLPS PRSE (SEQ ID NO:495), where X is any amino acid other than Ser. In some cases, X is Ala;

[0509] PAGLLDLRQG MFAQLVAQNV LLIDGPLSWY SDPGLAGVSL TGGLSYKEDT KELVVAKAGV YYVFFQLELR RVVAGEGSGS VSLALHLQPL RSAAGAAALA LTVXLPPASS EARNSAFGFQ GRLLHLSAGQ RLGVHLHTEA RARHAWQLTQ GATVLGLFRV TPEIPAGLPS PRSE (SEQ ID NO:496), where X is any amino acid other than Asp. In some cases, X is Ala;

[0510] PAGLLDLRQG MFAQLVAQNV LLIDGPLSWY SDPGLAGVSL TGGLSYKEDT KELVVAKAGV YYVFFQLELR RVVAGEGSGS VSLALHLQPL RSAAGAAALA LTVDXPPASS EARNSAFGFQ GRLLHLSAGQ RLGVHLHTEA RARHAWQLTQ GATVLGLFRV TPEIPAGLPS PRSE (SEQ ID NO:497), where X is any amino acid other than Leu. In some cases, X is Ala;

[0511] PAGLLDLRQG MFAQLVAQNV LLIDGPLSWY SDPGLAGVSL TGGLSYKEDT KELVVAKAGV YYVFFQLELR RVVAGEGSGS VSLALHLQPL RSAAGAAALA LTVDLXPASS EARNSAFGFQ GRLLHLSAGQ RLGVHLHTEA RARHAWQLTQ GATVLGLFRV TPEIPAGLPS PRSE (SEQ ID NO:498), where X is any amino acid other than Pro. In some cases, X is Ala;

[0512] PAGLLDLRQG MFAQLVAQNV LLIDGPLSWY SDPGLAGVSL TGGLSYKEDT KELVVAKAGV YYVFFQLELR RVVAGEGSGS VSLALHLQPL RSAAGAAALA LTVDLPPAXS EARNSAFGFQ GRLLHLSAGQ RLGVHLHTEA RARHAWQLTQ GATVLGLFRV TPEIPAGLPS PRSE (SEQ ID NO:499), where X is any amino acid other than Ser. In some cases, X is Ala;

[0513] PAGLLDLRQG MFAQLVAQNV LLIDGPLSWY SDPGLAGVSL TGGLSYKEDT KELVVAKAGV YYVFFQLELR RVVAGEGSGS VSLALHLQPL RSAAGAAALA LTVDLPPASX EARNSAFGFQ GRLLHLSAGQ RLGVHLHTEA RARHAWQLTQ GATVLGLFRV TPEIPAGLPS PRSE (SEQ ID NO:500), where X is any amino acid other than Ser. In some cases, X is Ala;

[0514] PAGLLDLRQG MFAQLVAQNV LLIDGPLSWY SDPGLAGVSL TGGLSYKEDT KELVVAKAGV YYVFFQLELR RVVAGEGSGS VSLALHLQPL RSAAGAAALA LTVDLPPASS XARNSAFGFQ GRLLHLSAGQ RLGVHLHTEA RARHAWQLTQ GATVLGLFRV TPEIPAGLPS PRSE (SEQ ID NO:501), where X is any amino acid other than Glu. In some cases, X is Ala;

[0515] PAGLLDLRQG MFAQLVAQNV LLIDGPLSWY SDPGLAGVSL TGGLSYKEDT KELVVAKAGV YYVFFQLELR RVVAGEGSGS VSLALHLQPL RSAAGAAALA LTVDLPPASS EAXNSAFGFQ GRLLHLSAGQ RLGVHLHTEA RARHAWQLTQ GATVLGLFRV TPEIPAGLPS PRSE (SEQ ID NO:502), where X is any amino acid other than Arg. In some cases, X is Ala;

[0516] PAGLLDLRQG MFAQLVAQNV LLIDGPLSWY SDPGLAGVSL TGGLSYKEDT KELVVAKAGV YYVFFQLELR RVVAGEGSGS VSLALHLQPL RSAAGAAALA LTVDLPPASS EARXSAFGFQ GRLLHLSAGQ RLGVHLHTEA RARHAWQLTQ GATVLGLFRV TPEIPAGLPS PRSE (SEQ ID NO:503), where X is any amino acid other than Asn. In some cases, X is Ala;

[0517] PAGLLDLRQG MFAQLVAQNV LLIDGPLSWY SDPGLAGVSL TGGLSYKEDT KELVVAKAGV YYVFFQLELR RVVAGEGSGS VSLALHLQPL RSAAGAAALA LTVDLPPASS EARNXAFGFQ GRLLHLSAGQ RLGVHLHTEA RARHAWQLTQ GATVLGLFRV TPEIPAGLPS PRSE (SEQ ID NO:504), where X is any amino acid other than Ser. In some cases, X is Ala;

[0518] PAGLLDLRQG MFAQLVAQNV LLIDGPLSWY SDPGLAGVSL TGGLSYKEDT KELVVAKAGV YYVFFQLELR RVVAGEGSGS VSLALHLQPL RSAAGAAALA LTVDLPPASS EARNSAXGFQ GRLLHLSAGQ RLGVHLHTEA RARHAWQLTQ GATVLGLFRV TPEIPAGLPS PRSE (SEQ ID NO:505), where X is any amino acid other than Phe. In some cases, X is Ala;

[0519] PAGLLDLRQG MFAQLVAQNV LLIDGPLSWY SDPGLAGVSL TGGLSYKEDT KELVVAKAGV YYVFFQLELR RVVAGEGSGS VSLALHLQPL RSAAGAAALA LTVDLPPASS EARNSAFGFQ GRLLHLSAGX RLGVHLHTEA RARHAWQLTQ GATVLGLFRV TPEIPAGLPS PRSE (SEQ ID NO:506), where X is any amino acid other than Gln. In some cases, X is Ala;

[0520] PAGLLDLRQG MFAQLVAQNV LLIDGPLSWY SDPGLAGVSL TGGLSYKEDT KELVVAKAGV YYVFFQLELR RVVAGEGSGS VSLALHLQPL RSAAGAAALA LTVDLPPASS EARNSAFGFQ GRLLHLSAGQ XLGVHLHTEA RARHAWQLTQ GATVLGLFRV TPEIPAGLPS PRSE (SEQ ID NO:507), where X is any amino acid other than Arg. In some cases, X is Ala;

[0521] PAGLLDLRQG MFAQLVAQNV LLIDGPLSWY SDPGLAGVSL TGGLSYKEDT KELVVAKAGV YYVFFQLELR RVVAGEGSGS VSLALHLQPL RSAAGAAALA LTVDLPPASS EARNSAFGFQ GRLLHLSAGQ RXGVHLHTEA RARHAWQLTQ GATVLGLFRV TPEIPAGLPS PRSE (SEQ ID NO:508), where X is any amino acid other than Leu. In some cases, X is Ala;

[0522] PAGLLDLRQG MFAQLVAQNV LLIDGPLSWY SDPGLAGVSL TGGLSYKEDT KELVVAKAGV YYVFFQLELR RVVAGEGSGS VSLALHLQPL RSAAGAAALA LTVDLPPASS EARNSAFGFQ GRLLHLSAGQ RLXVHLHTEA RARHAWQLTQ GATVLGLFRV TPEIPAGLPS PRSE (SEQ ID NO:509), where X is any amino acid other than Gly. In some cases, X is Ala;

[0523] PAGLLDLRQG MFAQLVAQNV LLIDGPLSWY SDPGLAGVSL TGGLSYKEDT KELVVAKAGV YYVFFQLELR RVVAGEGSGS VSLALHLQPL RSAAGAAALA LTVDLPPASS EARNSAFGFQ GRLLHLSAGQ RLGXHLHTEA RARHAWQLTQ GATVLGLFRV TPEIPAGLPS PRSE (SEQ ID NO:510), where X is any amino acid other than Val. In some cases, X is Ala;

[0524] PAGLLDLRQG MFAQLVAQNV LLIDGPLSWY SDPGLAGVSL TGGLSYKEDT KELVVAKAGV YYVFFQLELR RVVAGEGSGS VSLALHLQPL RSAAGAAALA LTVDLPPASS EARNSAFGFQ GRLLHLSAGQ RLGVXLHTEA RARHAWQLTQ GATVLGLFRV TPEIPAGLPS PRSE (SEQ ID NO:511), where X is any amino acid other than His. In some cases, X is Ala;

[0525] PAGLLDLRQG MFAQLVAQNV LLIDGPLSWY SDPGLAGVSL TGGLSYKEDT KELVVAKAGV YYVFFQLELR RVVAGEGSGS VSLALHLQPL RSAAGAAALA LTVDLPPASS EARNSAFGFQ GRLLHLSAGQ RLGVHXHTEA RARHAWQLTQ GATVLGLFRV TPEIPAGLPS PRSE (SEQ ID NO:512), where X is any amino acid other than Leu. In some cases, X is Ala;

[0526] PAGLLDLRQG MFAQLVAQNV LLIDGPLSWY SDPGLAGVSL TGGLSYKEDT KELVVAKAGV YYVFFQLELR RVVAGEGSGS VSLALHLQPL RSAAGAAALA LTVDLPPASS EARNSAFGFQ GRLLHLSAGQ RLGVHLXTEA RARHAWQLTQ GATVLGLFRV TPEIPAGLPS PRSE (SEQ ID NO:513), where X is any amino acid other than His. In some cases, X is Ala;

[0527] PAGLLDLRQG MFAQLVAQNV LLIDGPLSWY SDPGLAGVSL TGGLSYKEDT KELVVAKAGV YYVFFQLELR RVVAGEGSGS VSLALHLQPL RSAAGAAALA LTVDLPPASS EARNSAFGFQ GRLLHLSAGQ RLGVHLHXEA RARHAWQLTQ GATVLGLFRV TPEIPAGLPS PRSE (SEQ ID NO:514), where X is any amino acid other than Thr. In some cases, X is Ala;

[0528] PAGLLDLRQG MFAQLVAQNV LLIDGPLSWY SDPGLAGVSL TGGLSYKEDT KELVVAKAGV YYVFFQLELR RVVAGEGSGS VSLALHLQPL RSAAGAAALA LTVDLPPASS EARNSAFGFQ GRLLHLSAGQ RLGVHLHTXA RARHAWQLTQ GATVLGLFRV TPEIPAGLPS PRSE (SEQ ID NO:515), where X is any amino acid other than Glu. In some cases, X is Ala;

[0529] PAGLLDLRQG MFAQLVAQNV LLIDGPLSWY SDPGLAGVSL TGGLSYKEDT KELVVAKAGV YYVFFQLELR RVVAGEGSGS VSLALHLQPL RSAAGAAALA LTVDLPPASS EARNSAFGFQ GRLLHLSAGQ RLGVHLHTEA XARHAWQLTQ GATVLGLFRV TPEIPAGLPS PRSE (SEQ ID NO:516), where X is any amino acid other than Arg. In some cases, X is Ala;

[0530] PAGLLDLRQG MFAQLVAQNV LLIDGPLSWY SDPGLAGVSL TGGLSYKEDT KELVVAKAGV YYVFFQLELR RVVAGEGSGS VSLALHLQPL RSAAGAAALA LTVDLPPASS EARNSAFGFQ GRLLHLSAGQ RLGVHLHTEA RAXHAWQLTQ GATVLGLFRV TPEIPAGLPS PRSE (SEQ ID NO:517), where X is any amino acid other than Arg. In some cases, X is Ala;

[0531] PAGLLDLRQG MFAQLVAQNV LLIDGPLSWY SDPGLAGVSL TGGLSYKEDT KELVVAKAGV YYVFFQLELR RVVAGEGSGS VSLALHLQPL RSAAGAAALA LTVDLPPASS EARNSAFGFQ GRLLHLSAGQ RLGVHLHTEA RARXAWQLTQ GATVLGLFRV TPEIPAGLPS PRSE (SEQ ID NO:518), where X is any amino acid other than His. In some cases, X is Ala;

[0532] PAGLLDLRQG MFAQLVAQNV LLIDGPLSWY SDPGLAGVSL TGGLSYKEDT KELVVAKAGV YYVFFQLELR RVVAGEGSGS VSLALHLQPL RSAAGAAALA LTVDLPPASS EARNSAFGFQ GRLLHLSAGQ RLGVHLHTEA RARHAXQLTQ GATVLGLFRV TPEIPAGLPS PRSE (SEQ ID NO:519), where X is any amino acid other than Trp. In some cases, X is Ala;

[0533] PAGLLDLRQG MFAQLVAQNV LLIDGPLSWY SDPGLAGVSL TGGLSYKEDT KELVVAKAGV YYVFFQLELR RVVAGEGSGS VSLALHLQPL RSAAGAAALA LTVDLPPASS EARNSAFGFQ GRLLHLSAGQ RLGVHLHTEA RARHAWQXTQ GATVLGLFRV TPEIPAGLPS PRSE (SEQ ID NO:520), where X is any amino acid other than Leu. In some cases, X is Ala;

[0534] PAGLLDLRQG MFAQLVAQNV LLIDGPLSWY SDPGLAGVSL TGGLSYKEDT KELVVAKAGV YYVFFQLELR RVVAGEGSGS VSLALHLQPL RSAAGAAALA LTVDLPPASS EARNSAFGFQ GRLLHLSAGQ RLGVHLHTEA RARHAWQLXQ GATVLGLFRV TPEIPAGLPS PRSE (SEQ ID NO:521), where X is any amino acid other than Thr. In some cases, X is Ala;

[0535] PAGLLDLRQG MFAQLVAQNV LLIDGPLSWY SDPGLAGVSL TGGLSYKEDT KELVVAKAGV YYVFFQLELR RVVAGEGSGS VSLALHLQPL RSAAGAAALA LTVDLPPASS EARNSAFGFQ GRLLHLSAGQ RLGVHLHTEA RARHAWQLTXGATVLGLFRV TPEIPAGLPS PRSE (SEQ ID NO:522), where X is any amino acid other than Gln. In some cases, X is Ala;

[0536] PAGLLDLRQG MFAQLVAQNV LLIDGPLSWY SDPGLAGVSL TGGLSYKEDT KELVVAKAGV YYVFFQLELR RVVAGEGSGS VSLALHLQPL RSAAGAAALA LTVDLPPASS EARNSAFGFQ GRLLHLSAGQ RLGVHLHTEA RARHAWQLTQ XATVLGLFRV TPEIPAGLPS PRSE (SEQ ID NO:523), where X is any amino acid other than Gly. In some cases, X is Ala;

[0537] PAGLLDLRQG MFAQLVAQNV LLIDGPLSWY SDPGLAGVSL TGGLSYKEDT KELVVAKAGV YYVFFQLELR RVVAGEGSGS VSLALHLQPL RSAAGAAALA LTVDLPPASS EARNSAFGFQ GRLLHLSAGQ RLGVHLHTEA RARHAWQLTQ GAXVLGLFRV TPEIPAGLPS PRSE (SEQ ID NO:524), where X is any amino acid other than Thr. In some cases, X is Ala; and

[0538] PAGLLDLRQG MFAQLVAQNV LLIDGPLSWY SDPGLAGVSL TGGLSYKEDT KELVVAKAGV YYVFFQLELR RVVAGEGSGS VSLALHLQPL RSAAGAAALA LTVDLPPASS EARNSAFGFQ GRLLHLSAGQ RLGVHLHTEA RARHAWQLTQ GATXLGLFRV TPEIPAGLPS PRSE (SEQ ID NO:525), where X is any amino acid other than Val. In some cases, X is Ala.

### IL-2 Variants

[0539] In some cases, a variant immunomodulatory polypeptide present in a TMMP of the present disclosure is a variant IL-2 polypeptide. Wild-type IL-2 binds to IL-2 receptor (IL-2R), i.e., a heterotrimeric polypeptide comprising IL-2Rα, IL-2Rβ, and IL-2Rγ.

[0540] A wild-type IL-2 amino acid sequence can be as follows: APTSSSTKKT QLQLEHLLLD LQMILNGINN YKNPKLTRML TFKFYMPKKA TELKHLQCLEEELKPLEEVL NLAQSKNFHL RPRDLISNIN VIVLELKGSE TTFMCEYADE TATIVEFLNRWITFCQSIIS TLT (SEQ ID NO:15).

[0541] Wild-type IL2 binds to an IL2 receptor (IL2R) on the surface of a cell. An IL2 receptor is in some cases a heterotrimeric polypeptide comprising an alpha chain (IL-2Rα; also referred to as CD25), a beta chain (IL-2Rβ; also referred to as CD122: and a gamma chain (IL-2Rγ; also referred to as CD132). Amino acid sequences of human IL-2Rα, IL2Rβ, and IL-2Rγ can be as follows.

Human IL-2Rα:
(SEQ ID NO: 16)
ELCDDDPPE IPHATFKAMA YKEGTMLNCE CKRGFRRIKS
GSLYMLCTGN SSHSSWDNQC QCTSSATRNT TKQVTPQPEE
QKERKTTEMQ SPMQPVDQAS LPGHCREPPP WENEATERIY
HFVVGQMVYY QCVQGYRALH RGPAESVCKM THGKTRWTQP
QLICTGEMET SQFPGEEKPQ ASPEGRPESE TSCLVTTTDF
QIQTEMAATM ETSIFTTEYQ VAVAGCVFLL ISVLLLSGLT
WQRRQRKSRR TI.
Human IL-2R13:
(SEQ ID NO: 17)
VNG TSQFTCFYNS RANISCVWSQ DGALQDTSCQ
VHAWPDRRRW NQTCELLPVS QASWACNLIL GAPDSQKLTT
VDIVTLRVLC REGVRWRVMA IQDFKPFENL RLMAPISLQV
VHVETHRCNI SWEISQASHY FERHLEFEAR TLSPGHTWEE
APLLTLKQKQ EWICLETLTP DTQYEFQVRV KPLQGEFTTW
SPWSQPLAFR TKPAALGKDT IPWLGHLLVG LSGAFGFIIL
VYLLINCRNT GPWLKKVLKC NTPDPSKFFS QLSSEHGGDV
QKWLSSPFPS SSFSPGGLAP EISPLEVLER DKVTQLLLQQ
DKVPEPASLS SNHSLTSCFT NQGYFFFHLP DALEIEACQV
YFTYDPYSEE DPDEGVAGAP TGSSPQPLQP LSGEDDAYCT
FPSRDDLLLF SPSLLGGPSP PSTAPGGSGA GEERMPPSLQ
ERVPRDWDPQ PLGPPTPGVP DLVDFQPPPE LVLREAGEEV
PDAGPREGVS FPWSRPPGQG EFRALNARLP LNTDAYLSLQ
ELQGQDPTHL V.
Human IL-2Rβ:
(SEQ ID NO: 18)
LNTTILTP NGNEDTTADF FLTTMPTDSL SVSTLPLPEV
QCFVFNVEYM NCTWNSSSEP QPTNLTLHYW YKNSDNDKVQ
KCSHYLFSEE ITSGCQLQKK EIHLYQTFVV QLQDPREPRR
QATQMLKLQN LVIPWAPENL TLHKLSESQL ELNWNNRFLN
HCLEHLVQYR TDWDHSWTEQ SVDYRHKFSL PSVDGQKRYT
FRVRSRFNPL CGSAQHWSEW SHPIHWGSNT SKENPFLFAL
EAVVISVGSM GLIISLLCVY FWLERTMPRI PTLKNLEDLV
TEYHGNFSAW SGVSKGLAES LQPDYSERLC LVSEIPPKGG
ALGEGPGASP CNQHSPYWAP PCYTLKPET.

[0542] In some cases, where a TMMP of the present disclosure comprises a variant IL-2 polypeptide, a “cognate co-immunomodulatory polypeptide” is an IL-2R comprising polypeptides comprising the amino acid sequences of SEQ ID NO:16, 17, and 18.

[0543] In some cases, a variant IL-2 polypeptide exhibits reduced binding affinity to IL-2R, compared to the binding affinity of a IL-2 polypeptide comprising the amino acid sequence set forth in SEQ ID NO:15. For example, in some cases, a variant IL-2 polypeptide binds IL-2R with a binding affinity that is at least 10% less, at least 15% less, at least 20% less, at least 25%, at least 30% less, at least 35% less, at least 40% less, at least 45% less, at least 50% less, at least 55% less, at least 60% less, at least 65% less, at least 70% less, at least 75% less, at least 80% less, at least 85% less, at least 90% less, at least 95% less, or more than 95% less, than the binding affinity of an IL-2 polypeptide comprising the amino acid sequence set forth in SEQ ID NO:15 for an IL-2R (e.g., an IL-2R comprising polypeptides comprising the amino acid sequence set forth in SEQ ID NOs:16-18), when assayed under the same conditions.

[0544] In some cases, a variant IL-2 polypeptide has a binding affinity to IL-2R that is from 100 nM to 100 μM. As another example, in some cases, a variant IL-2 polypeptide has a binding affinity for IL-2R (e.g., an IL-2R comprising polypeptides comprising the amino acid sequence set forth in SEQ ID NOs:16-18) that is from about 100 nM to 150 nM, from about 150 nM to about 200 nM, from about 200 nM to about 250 nM, from about 250 nM to about 300 nM, from about 300 nM to about 350 nM, from about 350 nM to about 400 nM, from about 400 nM to about 500 nM, from about 500 nM to about 600 nM, from about 600 nM to about 700 nM, from about 700 nM to about 800 nM, from about 800 nM to about 900 nM, from about 900 nM to about 1 μM, to about 1 μM to about 5 μM, from about 5 μM to about 10 μM, from about 10 μM to about 15 μM, from about 15 μM to about 20 μM, from about 20 μM to about 25 μM, from about 25 μM to about 50 μM, from about 50 μM to about 75 μM, or from about 75 μM to about 100 μM.

[0545] In some cases, a variant IL-2 polypeptide has a single amino acid substitution compared to the IL-2 amino acid sequence set forth in SEQ ID NO:15. In some cases, a variant IL-2 polypeptide has from 2 to 10 amino acid substitutions compared to the IL-2 amino acid sequence set forth in SEQ ID NO:15. In some cases, a variant IL-2 polypeptide has 2 amino acid substitutions compared to the IL-2 amino acid sequence set forth in SEQ ID NO:15. In some cases, a variant IL-2 polypeptide has 3 amino acid substitutions compared to the IL-2 amino acid sequence set forth in SEQ ID NO:15. In some cases, a variant IL-2 polypeptide has 4 amino acid substitutions compared to the IL-2 amino acid sequence set forth in SEQ ID NO:15. In some cases, a variant IL-2 polypeptide has 5 amino acid substitutions compared to the IL-2 amino acid sequence set forth in SEQ ID NO:15. In some cases, a variant IL-2 polypeptide has 6 amino acid substitutions compared to the IL-2 amino acid sequence set forth in SEQ ID NO:15. In some cases, a variant IL-2 polypeptide has 7 amino acid substitutions compared to the IL-2 amino acid sequence set forth in SEQ ID NO:15. In some cases, a variant IL-2 polypeptide has 8 amino acid substitutions compared to the IL-2 amino acid sequence set forth in SEQ ID NO:15. In some cases, a variant IL-2 polypeptide has 9 amino acid substitutions compared to the IL-2 amino acid sequence set forth in SEQ ID NO:15. In some cases, a variant IL-2 polypeptide has 10 amino acid substitutions compared to the IL-2 amino acid sequence set forth in SEQ ID NO:15.

[0546] Suitable IL-2 variants include a polypeptide that comprises an amino acid sequence having at least 90%, at least 95%, at least 98%, at least 99%, or 100%, amino acid sequence identity to any one of the following amino acid sequences:

[0547] APTSSSTKKT QLQLEHLLLD LQMILNGINN YKNPKLTRML TXKFYMPKKA TELKHLQCLE EELKPLEEVL NLAQSKNFHL RPRDLISNIN VIVLELKGSE TTFMCEYADE TATIVEFLNR WITFCQSIIS TLT (SEQ ID NO:527), where X is any amino acid other than Phe. In some cases, X is Ala. In some cases, X is Met. In some cases, X is Pro. In some cases, X is Ser. In some cases, X is Thr. In some cases, X is Trp. In some cases, X is Tyr. In some cases, X is Val. In some cases, X is His;

[0548] APTSSSTKKT QLQLEHLLLX LQMILNGINN YKNPKLTRML TFKFYMPKKA TELKHLQCLE EELKPLEEVL NLAQSKNFHL RPRDLISNIN VIVLELKGSE TTFMCEYADE TATIVEFLNR WITFCQSIIS TLT (SEQ ID NO:528), where X is any amino acid other than Asp. In some cases, X is Ala;

[0549] APTSSSTKKT QLQLXHLLLD LQMILNGINN YKNPKLTRML TFKFYMPKKA TELKHLQCLE EELKPLEEVL NLAQSKNFHL RPRDLISNIN VIVLELKGSE TTFMCEYADE TATIVEFLNR WITFCQSIIS TLT (SEQ ID NO:529), where X is any amino acid other than Glu. In some cases, X is Ala.

[0550] APTSSSTKKT QLQLEXLLLD LQMILNGINN YKNPKLTRML TFKFYMPKKA TELKHLQCLE EELKPLEEVL NLAQSKNFHL RPRDLISNIN VIVLELKGSE TTFMCEYADE TATIVEFLNR WITFCQSIIS TLT (SEQ ID NO:530), where X is any amino acid other than His. In some cases, X is Ala. In some cases, X is Thr. In some cases, X is Asn. In some cases, X is Cys. In some cases, X is Gln. In some cases, X is Met. In some cases, X is Val. In some cases, X is Trp;

[0551] APTSSSTKKT QLQLEXLLLD LQMILNGINN YKNPKLTRML TFKFYMPKKA TELKHLQCLE EELKPLEEVL NLAQSKNFHL RPRDLISNIN VIVLELKGSE TTFMCEYADE TATIVEFLNR WITFCQSIIS TLT (SEQ ID NO:531), where X is any amino acid other than His. In some cases, X is Ala. In some cases, X is Arg. In some cases, X is Asn. In some cases, X is Asp. In some cases, X is Cys. In some cases, X is Glu. In some cases, X is Gln. In some cases, X is Gly. In some cases, X is Ile. I n some cases, X is Lys. In some cases, X is Leu. In some cases, X is Met. In some cases, X is Phe. In some cases, X is Pro. In some cases, X is Ser. In some cases, X is Thr. In some cases, X is Tyr. In some cases, X is Trp. In some cases, X is Val;

[0552] APTSSSTKKT QLQLEHLLLD LQMILNGINN YKNPKLTRML TFKFXMPKKA TELKHLQCLE EELKPLEEVL NLAQSKNFHL RPRDLISNIN VIVLELKGSE TTFMCEYADE TATIVEFLNR WITFCQSIIS TLT (SEQ ID NO:532), where X is any amino acid other than Tyr. In some cases, X is Ala;

[0553] APTSSSTKKT QLQLEHLLLD LQMILNGINN YKNPKLTRML TFKFYMPKKA TELKHLQCLE EELKPLEEVL NLAQSKNFHL RPRDLISNIN VIVLELKGSE TTFMCEYADE TATIVEFLNR WITFCXSIIS TLT (SEQ ID NO:533), where X is any amino acid other than Gln. In some cases, X is Ala;

[0554] APTSSSTKKT QLQLEX₁LLLD LQMILNGINN YKNPKLTRML TX₂KFYMPKKA TELKHLQCLE EELKPLEEVL NLAQSKNFHL RPRDLISNIN VIVLELKGSE TTFMCEYADE TATIVEFLNR WITFCQSIIS TLT (SEQ ID NO:534), where X₁ is any amino acid other than His, and where X₂ is any amino acid other than Phe. In some cases, X₁ is Ala. In some cases, X₂ is Ala. In some cases, X₁ is Ala; and X₂ is Ala. In some cases, X₁ is Thr; and X₂ is Ala;

[0555] APTSSSTKKT QLQLEHLLLX₁LQMILNGINN YKNPKLTRML TX₂KFYMPKKA TELKHLQCLE EELKPLEEVL NLAQSKNFHL RPRDLISNIN VIVLELKGSE TTFMCEYADE TATIVEFLNR WITFCQSIIS TLT (SEQ ID NO:535), where X₁ is any amino acid other than Asp; and where X₂ is any amino acid other than Phe. In some cases, X₁ is Ala. In some cases, X₂ is Ala. In some cases, X₁ is Ala; and X₂ is Ala;

[0556] APTSSSTKKT QLQLX₁HLLLX₂ LQMILNGINN YKNPKLTRML TX₃KFYMPKKA TELKHLQCLE EELKPLEEVL NLAQSKNFHL RPRDLISNIN VIVLELKGSE TTFMCEYADE TATIVEFLNR WITFCQSIIS TLT (SEQ ID NO:536), where X₁ is any amino acid other than Glu; where X₂ is any amino acid other than Asp; and where X₃ is any amino acid other than Phe. In some cases, X₁ is Ala. In some cases, X₂ is Ala. In some cases, X₃ is Ala. In some cases, X₁ is Ala; X₂ is Ala; and X₃ is Ala;

[0557] APTSSSTKKT QLQLEX₁LLLX₂ LQMILNGINN YKNPKLTRML TX₃KFYMPKKA TELKHLQCLE EELKPLEEVL NLAQSKNFHL RPRDLISNIN VIVLELKGSE TTFMCEYADE TATIVEFLNR WITFCQSIIS TLT (SEQ ID NO:537), where X₁ is any amino acid other than His; where X₂ is any amino acid other than Asp; and where X₃ is any amino acid other than Phe. In some cases, X₁ is Ala. In some cases, X₂ is Ala. In some cases, X₃ is Ala. In some cases, X₁ is Ala; X₂ is Ala; and X₃ is Ala;

[0558] APTSSSTKKT QLQLEHLLLX₁ LQMILNGINN YKNPKLTRML TX₂KFYMPKKA TELKHLQCLE EELKPLEEVL NLAQSKNFHL RPRDLISNIN VIVLELKGSE TTFMCEYADE TATIVEFLNR WITFCX₃SIIS TLT (SEQ ID NO:538), where X₁ is any amino acid other than Asp; where X₂ is any amino acid other than Phe; and where X₃ is any amino acid other than Gln. In some cases, X₁ is Ala. In some cases, X₂ is Ala. In some cases, X₃ is Ala. In some cases, X₁ is Ala; X₂ is Ala; and X₃ is Ala;

[0559] APTSSSTKKT QLQLEHLLLX₁ LQMILNGINN YKNPKLTRML TX₂KFX₃MPKKA TELKHLQCLE EELKPLEEVL NLAQSKNFHL RPRDLISNIN VIVLELKGSE TTFMCEYADE TATIVEFLNR WITFCQSIIS TLT (SEQ ID NO:539), where X₁ is any amino acid other than Asp; where X₂ is any amino acid other than Phe; and where X₃ is any amino acid other than Tyr. In some cases, X₁ is Ala. In some cases, X₂ is Ala. In some cases, X₃ is Ala. In some cases, X₁ is Ala; X₂ is Ala; and X₃ is Ala;

[0560] APTSSSTKKT QLQLEX₁LLLX₂ LQMILNGINN YKNPKLTRML TX₃KFX₄MPKKA TELKHLQCLE EELKPLEEVL NLAQSKNFHL RPRDLISNIN VIVLELKGSE TTFMCEYADE TATIVEFLNR WITFCQSIIS TLT (SEQ ID NO:540), where X₁ is any amino acid other than His; where X₂ is any amino acid other than Asp; where X₃ is any amino acid other than Phe; and where X₄ is any amino acid other than Tyr. In some cases, X₁ is Ala. In some cases, X₂ is Ala. In some cases, X₃ is Ala. In some cases, X₄ is Ala. In some cases, X₁ is Ala; X₂ is Ala; X₃ is Ala; and X₄ is Ala;

[0561] APTSSSTKKT QLQLEHLLLX₁ LQMILNGINN YKNPKLTRML TX₂KFX₃MPKKA TELKHLQCLE EELKPLEEVL NLAQSKNFHL RPRDLISNIN VIVLELKGSE TTFMCEYADE TATIVEFLNR WITFCX₄SIIS TLT (SEQ ID NO:541), where X₁ is any amino acid other than Asp; where X₂ is any amino acid other than Phe; where X₃ is any amino acid other than Tyr; and where X₄ is any amino acid other than Gln. In some cases, X₁ is Ala. In some cases, X₂ is Ala. In some cases, X₃ is Ala. In some cases, X₄ is Ala. In some cases, X₁ is Ala; X₂ is Ala; X₃ is Ala; and X₄ is Ala;

[0562] APTSSSTKKT QLQLEX₁LLLX₂ LQMILNGINN YKNPKLTRML TX₃KFX₄MPKKA TELKHLQCLE EELKPLEEVL NLAQSKNFHL RPRDLISNIN VIVLELKGSE TTFMCEYADE TATIVEFLNR WITFCX₅SIIS TLT (SEQ ID NO:542), where X₁ is any amino acid other than His; where X₂ is any amino acid other than Asp; where X₃ is any amino acid other than Phe; where X₄ is any amino acid other than Tyr; and where X₅ is any amino acid other than Gln. In some cases, X1 is Ala. In some cases, X₂ is Ala. In some cases, X₃ is Ala. In some cases, X₄ is Ala. In some cases, X₅ is Ala. In some cases, X1 is Ala; X₂ is Ala; X₃ is Ala; X₄ is Ala; X₅ is Ala; and

[0563] APTSSSTKKT QLQLEX₁LLLD LQMILNGINN YKNPKLTRML TX₂KFYMPKKA TELKHLQCLE EELKPLEEVL NLAQSKNFHL RPRDLISNIN VIVLELKGSE TTFMCEYADE TATIVEFLNR WITFCX₃SIIS TLT (SEQ ID NO:543), where X₁ is any amino acid other than His; where X₂ is any amino acid other than Phe; and where X₃ is any amino acid other than Gln. In some cases, X₁ is Ala. In some cases, X₂ is Ala. In some cases, X₃ is Ala. In some cases, X₁ is Ala; X₂ is Ala; and X₃ is Ala.

### Additional Polyeptides

[0564] A polypeptide chain of a TMMP of the present disclosure can include one or more polypeptides in addition to those described above. Suitable additional polypeptides include epitope tags and affinity domains. The one or more additional polypeptide can be included at the N-terminus of a polypeptide chain of a TMMP, at the C-terminus of a polypeptide chain of a TMMP, or internally within a polypeptide chain of a TMMP.

### Epitope Tag

[0565] Suitable epitope tags include, but are not limited to, hemagglutinin (HA; e.g., YPYDVPDYA (SEQ ID NO:544); FLAG (e.g., DYKDDDDK (SEQ ID NO:545); c-myc (e.g., EQKLISEEDL; SEQ ID NO:546), and the like.

### Affinity Domain

[0566] Affinity domains include peptide sequences that can interact with a binding partner, e.g., such as one immobilized on a solid support, useful for identification or purification. DNA sequences encoding multiple consecutive single amino acids, such as histidine, when fused to the expressed protein, may be used for one-step purification of the recombinant protein by high affinity binding to a resin column, such as nickel sepharose. Exemplary affinity domains include His5 (HHHHH) (SEQ ID NO:547), HisX6 (HHHHHH) (SEQ ID NO:548), C-myc (EQKLISEEDL) (SEQ ID NO:549), Flag (DYKDDDDK) (SEQ ID NO:550), StrepTag (WSHPQFEK) (SEQ ID NO:551), hemagglutinin, e.g., HA Tag (YPYDVPDYA) (SEQ ID NO:552), glutathione-S-transferase (GST), thioredoxin, cellulose binding domain, RYIRS (SEQ ID NO:553), Phe-His-His-Thr (SEQ ID NO:554), chitin binding domain, S-peptide, T7 peptide, SH2 domain, C-end RNA tag, WEAAAREACCRECCARA (SEQ ID NO:555), metal binding domains, e.g., zinc binding domains or calcium binding domains such as those from calcium-binding proteins, e.g., calmodulin, troponin C, calcineurin B, myosin light chain, recoverin, S-modulin, visinin, VILIP, neurocalcin, hippocalcin, frequenin, caltractin, calpain large-subunit, S100 proteins, parvalbumin, calbindin D9K, calbindin D28K, and calretinin, inteins, biotin, streptavidin, MyoD, Id, leucine zipper sequences, and maltose binding protein.

### Drug Conjugates

[0567] A polypeptide chain of a TMMP of the present disclosure can comprise a small molecule drug linked (e.g., covalently attached) to the polypeptide chain. For example, where a TMMP of the present disclosure comprises an Fc polypeptide, the Fc polypeptide can comprise a covalently linked small molecule drug. In some cases, the small molecule drug is a cancer chemotherapeutic agent, e.g., a cytotoxic agent. A polypeptide chain of a TMMP of the present disclosure can comprise a cytotoxic agent linked (e.g., covalently attached) to the polypeptide chain. For example, where a TMMP of the present disclosure comprises an Fc polypeptide, the Fc polypeptide can comprise a covalently linked cytotoxic agent. Cytotoxic agents include prodrugs.

[0568] A drug (e.g., a cancer chemotherapeutic agent) can be linked directly or indirectly to a polypeptide chain of a TMMP of the present disclosure. For example, where a TMMP of the present disclosure comprises an Fc polypeptide, a drug (e.g., a cancer chemotherapeutic agent) can be linked directly or indirectly to the Fc polypeptide. Direct linkage can involve linkage directly to an amino acid side chain. Indirect linkage can be linkage via a linker. A drug (e.g., a cancer chemotherapeutic agent) can be linked to a polypeptide chain (e.g., an Fc polypeptide) of a TMMP of the present disclosure via a thioether bond, an amide bond, a carbamate bond, a disulfide bond, or an ether bond.

[0569] Linkers include cleavable linkers and non-cleavable linkers. In some cases, the linker is a protease-cleavable linker. Suitable linkers include, e.g., peptides (e.g., from 2 to 10 amino acids in length; e.g., 2, 3, 4, 5, 6, 7, 8, 9, or 10 amino acids in length), alkyl chains, poly(ethylene glycol), disulfide groups, thioether groups, acid labile groups, photolabile groups, peptidase labile groups, and esterase labile groups. Non-limiting example of suitable linkers are: i) N-succinimidyl-[(N-maleimidopropionamido)-tetraethyleneglycol]ester (NHS-PEG4-maleimide); ii) N-succinimidyl 4-(2-pyridyldithio)butanoate (SPDB); N-succinimidyl 4-(2-pyridyldithio)2-sulfobutanoate (sulfo-SPDB); N-succinimidyl 4-(2-pyridyldithio) pentanoate (SPP); N-succinimidyl-4-(N-maleimidomethyl)-cyclohexane-1-carboxy-(6-amidocaproate) (LC-SMCC); κ-maleimidoundecanoic acid N-succinimidyl ester (KMUA); γ-maleimide butyric acid N-succinimidyl ester (GMBS); ε-maleimidocaproic acid N-hydroxysuccinimide ester (EMCS); m-maleimide benzoyl-N-hydroxysuccinimide ester (MBS); N-(α-maleimidoacetoxy)-succinimide ester (AMAS); succinimidyl-6-(β-maleimidopropionamide)hexanoate (SMPH); N-succinimidyl 4-(p-maleimidophenyl)butyrate (SMPB); N-(p-maleimidophenyl)isocyanate (PMPI); N-succinimidyl 4(2-pyridylthio)pentanoate (SPP); N-succinimidyl(4-iodo-acetyl)aminobenzoate (SIAB); 6-maleimidocaproyl (MC); maleimidopropanoyl (MP); p-aminobenzyloxycarbonyl (PAB); N-succinimidyl 4-(maleimidomethyl)cyclohexanecarboxylate (SMCC); N-succinimidyl-4-(N-maleimidomethyl)-cyclohexane-1-carboxy-(6-amidocaproate), a “long chain” analog of SMCC (LC-SMCC); 3-maleimidopropanoic acid N-succinimidyl ester (BMPS); N-succinimidyl iodoacetate (SIA); N-succinimidyl bromoacetate (SBA); and N-succinimidyl 3-(bromoacetamido)propionate (SBAP).

[0570] A polypeptide (e.g., an Fc polypeptide) can be modified with crosslinking reagents such as succinimidyl 4-(N-maleimidomethyl)-cyclohexane-1-carboxylate (SMCC), sulfo-SMCC, maleimidobenzoyl-N-hydroxysuccinimide ester (MBS), sulfo-MBS or succinimidyl-iodoacetate, as described in the literature, to introduce 1-10 reactive groups. The modified Fc polypeptide is then reacted with a thiol-containing cytotoxic agent to produce a conjugate.

[0571] For example, where a TMMP of the present disclosure comprises an Fc polypeptide, the polypeptide chain comprising the Fc polypeptide can be of the formula (A)-(L)-(C), where (A) is the polypeptide chain comprising the Fc polypeptide; where (L), if present, is a linker; and where (C) is a cytotoxic agent. (L), if present, links (A) to (C). In some cases, the polypeptide chain comprising the Fc polypeptide can comprise more than one cytotoxic agent (e.g., 2, 3, 4, or 5, or more than 5, cytotoxic agents).

[0572] Suitable drugs include, e.g., rapamycin. Suitable drugs include, e.g., retinoids, such as all-trans retinoic acid (ATRA); vitamin D3; a vitamin D3 analog; and the like. As noted above, in some cases, a drug is a cytotoxic agent. Cytotoxic agents are known in the art. A suitable cytotoxic agent can be any compound that results in the death of a cell, or induces cell death, or in some manner decreases cell viability, and includes, for example, maytansinoids and maytansinoid analogs, benzodiazepines, taxoids, CC-1065 and CC-1065 analogs, duocarmycins and duocarmycin analogs, enediynes, such as calicheamicins, dolastatin and dolastatin analogs including auristatins, tomaymycin derivatives, leptomycin derivatives, methotrexate, cisplatin, carboplatin, daunorubicin, doxorubicin, vincristine, vinblastine, melphalan, mitomycin C, chlorambucil and morpholino doxorubicin.

[0573] For example, in some cases, the cytotoxic agent is a compound that inhibits microtubule formation in eukaryotic cells. Such agents include, e.g., maytansinoid, benzodiazepine, taxoid, CC-1065, duocarmycin, a duocarmycin analog, calicheamicin, dolastatin, a dolastatin analog, auristatin, tomaymycin, and leptomycin, or a pro-drug of any one of the foregoing. Maytansinoid compounds include, e.g., N(2′)-deacetyl-N(2′)-(3-mercapto-1-oxopropyl)-maytansine (DM1); N(2′)-deacetyl-N(2′)-(4-mercapto-1-oxopentyl)-maytansine (DM3); and N(2′)-deacetyl-N2-(4-mercapto-4-methyl-1-oxopentyl)-maytansine (DM4). Benzodiazepines include, e.g., indolinobenzodiazepines and oxazolidinobenzodiazepines.

[0574] Cytotoxic agents include taxol; cytochalasin B; gramicidin D; ethidium bromide; emetine; mitomycin; etoposide; tenoposide; vincristine; vinblastine; colchicin; doxorubicin; daunorubicin; dihydroxy anthracin dione; maytansine or an analog or derivative thereof; an auristatin or a functional peptide analog or derivative thereof; dolastatin 10 or 15 or an analogue thereof; irinotecan or an analogue thereof; mitoxantrone; mithramycin; actinomycin D; 1-dehydrotestosterone; a glucocorticoid; procaine; tetracaine; lidocaine; propranolol; puromycin; calicheamicin or an analog or derivative thereof; an antimetabolite; 6 mercaptopurine; 6 thioguanine; cytarabine; fludarabin; 5 fluorouracil; decarbazine; hydroxyurea; asparaginase; gemcitabine; cladribine; an alkylating agent; a platinum derivative; duocarmycin A; duocarmycin SA; rachelmycin (CC-1065) or an analog or derivative thereof; an antibiotic; pyrrolo [2,1-c][1,4]-benzodiazepines (PDB); diphtheria toxin; ricin toxin; cholera toxin; a Shiga-like toxin; LT toxin; C3 toxin; Shiga toxin; pertussis toxin; tetanus toxin; soybean Bowman-Birk protease inhibitor; Pseudomonas exotoxin; alorin; saporin; modeccin; gelanin; abrin A chain; modeccin A chain; alpha-sarcin; Aleuritesfordii proteins; dianthin proteins; Phytolacca americana proteins; Momordica charantia inhibitor; curcin; crotin; Sapaonaria officinalis inhibitor; gelonin; mitogellin; restrictocin; phenomycin; enomycin toxins; ribonuclease (RNase); DNase I; Staphylococcal enterotoxin A; pokeweed antiviral protein; diphtherin toxin; and Pseudomonas endotoxin.

### Exemplary TMMPs

[0575] A TMMP of the present disclosure comprises at least one heterodimer comprising: a) a first polypeptide comprising: i) a peptide epitope; and ii) first MHC polypeptide; b) a second polypeptide comprising a second MHC polypeptide, c) at least one immunomodulatory polypeptide, where the first and/or the second polypeptide comprises the immunomodulatory polypeptide; d) an Ig Fc polypeptide or a non-Ig scaffold, where the first and/or the second polypeptide comprises the Ig Fc polypeptide or the non-Ig scaffold; and e) a tumor-targeting polypeptide (TTP), where the first and/or the second polypeptide comprises the TTP. These components can be arranged in any of a variety of configurations; non-limiting examples of such configurations are depicted schematically in FIG. 1A-1J; FIG. 2A-2F; and FIG. 12A-12C. Thus, in some cases, a TMMP of the present disclosure comprises at least one heterodimer comprising: a) a first polypeptide comprising: i) a peptide epitope; ii) first MHC polypeptide; and iii) at least one immunomodulatory polypeptide; b) a second polypeptide comprising a second MHC polypeptide; c) an Ig Fc polypeptide or a non-Ig scaffold, where the first and/or the second polypeptide comprises the Ig Fc polypeptide or the non-Ig scaffold; and d) a TTP, where the first and/or the second polypeptide comprises the TTP. In other instances, a TMMP of the present disclosure comprises at least one heterodimer comprising: a) a first polypeptide comprising: i) a peptide epitope; and ii) first MHC polypeptide; b) a second polypeptide comprising: i) a second MHC polypeptide; and ii) at least one immunomodulatory polypeptide; c) an Ig Fc polypeptide or a non-Ig scaffold, where the first and/or the second polypeptide comprises the Ig Fc polypeptide or the non-Ig scaffold; and d) a TTP), where the first and/or the second polypeptide comprises the TTP. In some cases, a TMMP of the present disclosure comprises at least one heterodimer comprising: a) a first polypeptide comprising: i) a peptide epitope; ii) first MHC polypeptide; and iii) at least one immunomodulatory polypeptide; b) a second polypeptide comprising: i) a second MHC polypeptide; and ii) at least one immunomodulatory polypeptide; c) an Ig Fc polypeptide or a non-Ig scaffold, where the first and/or the second polypeptide comprises the Ig Fc polypeptide or the non-Ig scaffold; and d) a TTP, where the first and/or the second polypeptide comprises the TTP. In some cases, the at least one immunomodulatory polypeptide is a wild-type immunomodulatory polypeptide. In other cases, the at least one immunomodulatory polypeptide is a variant immunomodulatory polypeptide that exhibits reduced affinity for a co-immunomodulatory polypeptide, compared to the affinity of a corresponding wild-type immunomodulatory polypeptide for the co-immunomodulatory polypeptide. In some cases, a TMMP of the present disclosure comprises two immunomodulatory polypeptides, where the two immunomodulatory is polypeptides have the same amino acid sequence. In some cases, the peptide epitope present in the TMMP is a cancer-associated peptide. In some cases, the peptide epitope present in a TMMP of the present disclosure is an infectious disease-associated peptide (e.g., a virus-encoded peptide). In some cases, the TTP is an antibody specific for a cancer-associated antigen, e.g., a cancer-associated antigen present on the surface of a cancer cell. In some cases, the TTP is a scFv or a nanobody. In some cases, the TTP is an antibody specific for a cancer-associated peptide/HLA complex (i.e., an HLA heavy chain and a β2M polypeptide) present on the surface of a cancer cell. In some cases, the TTP is a single-chain T-cell receptor (scTCR) specific for a cancer-associated antigen, e.g., a cancer-associated antigen present on the surface of a cancer cell. In some cases, the peptide epitope is a peptide of a CMV antigen. In some cases, the peptide epitope is a peptide of a CMV pp65 polypeptide. In some cases, the peptide epitope is a peptide of a CMV gB polypeptide. In some cases, the peptide epitope has the amino acid sequence NLVPMVATV (SEQ ID NO:395) and has a length of 9 amino acids.

[0576] In some cases, a TMMP of the present disclosure comprises: a) a first polypeptide comprising, in order from N-terminus to C-terminus: i) a peptide epitope; ii) a first MHC polypeptide; and iii) at least one immunomodulatory polypeptide; and b) a second polypeptide comprising, in order from N-terminus to C-terminus: i) a second MHC polypeptide; ii) an Ig Fc polypeptide; and iii) a TTP. See, e.g., FIG. 1C. In some cases, the first MHC polypeptide is a β2M polypeptide; and the second MHC polypeptide is an HLA heavy chain polypeptide. In some cases, the HLA heaving chain comprises: a) an amino acid sequence having at least 95% amino acid sequence identity to the HLA-A*0101, HLA-A*0201, HLA-A*0201, HLA-A*1101, HLA-A*2301, HLA-A*2402, HLA-A*2407, HLA-A*3303, or HLA-A*3401 amino acid sequence depicted in FIG. 7A; or b) an amino acid sequence having at least 95% amino acid sequence identity to the HLA-B*0702, HLA-B*0801, HLA-B*1502, HLA-B*3802, HLA-B*4001, HLA-B*4601, or HLA-B*5301 amino acid sequence depicted in FIG. 8A; or c) an amino acid sequence having at least 95% amino acid sequence identity to the HLA-C*0102, HLA-C*0303, HLA-C*0304, HLA-C*0401, HLA-C*0602, HLA-C*0701, HLA-C*0702, HLA-C*0801, or HLA-C*1502 depicted in FIG. 9A.In some cases, the HLA heavy chain polypeptide is an HLA-A*0201 polypeptide. In some cases, the HLA heavy chain polypeptide is an HLA-A24 polypeptide. In some cases, the HLA heavy chain comprises an A236C substitution. In some cases, the HLA heavy chain polypeptide is an HLA-A24 polypeptide with an A236C substitution. In some cases, the first polypeptide comprises, in order from N-terminus to C-terminus: i) a peptide epitope; ii) a first MHC polypeptide; and iii) two immunomodulatory polypeptides, where the two immunomodulatory polypeptides have the same amino acid sequence. In some cases, the Ig Fc polypeptide is a human IgG1 Fc polypeptide. In some cases, the Ig Fc polypeptide is an IgG1 Fc polypeptide comprising L234A and L235A substitutions. In some cases, the first and the second polypeptides are disulfide linked to one another. In some cases, the first and the second polypeptides are linked to one another by 2 disulfide bonds. In some cases, the immunomodulatory polypeptide comprises a wild-type amino acid sequence; in other cases, the immunomodulatory polypeptide is a variant, e.g., as described above. In some cases, the immunomodulatory polypeptide is a 4-1BBL polypeptide, e.g., a variant 4-1BBL polypeptide. In some cases, the immunomodulatory polypeptide is a variant IL-2 polypeptide. In some cases, the immunomodulatory polypeptide is a variant IL-2 polypeptide comprising H16A and F42A substitutions. In some cases, the immunomodulatory polypeptide is a variant IL-2 polypeptide comprising H16T and F42A substitutions. In some cases, a peptide linker is between one or more of: i) the second MHC polypeptide and the Ig Fc polypeptide; ii) the epitope and the first MHC polypeptide; iii) the first MHC polypeptide and the immunomodulatory polypeptide; iv) (where the TMMP comprises two immunomodulatory polypeptides on the first polypeptide chain) between the two immunomodulatory polypeptides; and v) the Ig Fc polypeptide and the TTP. In some cases, the peptide linker comprises the amino acid sequence AAAGG. In some cases, the peptide linker comprises the amino acid sequence (GGGGS)n, where n is an integer from 1 to 10 (e.g., where n is 2, 3, or 4). In some cases, the peptide epitope present in the TMMP is a cancer-associated peptide. In some cases, the peptide epitope present in a TMMP of the present disclosure is an infectious disease-associated peptide (e.g., a virus-encoded peptide). In some cases, the TTP is an antibody specific for a cancer-associated antigen, e.g., a cancer-associated antigen present on the surface of a cancer cell. In some cases, the TTP is a scFv or a nanobody. In some cases, the TTP is an antibody specific for a cancer-associated peptide/HLA complex (i.e., an HLA heavy chain and a β2M polypeptide) present on the surface of a cancer cell. In some cases, the TTP is a scTCR specific for a cancer-associated antigen, e.g., a cancer-associated antigen present on the surface of a cancer cell. In some cases, the TTP is a scFv that binds Her2/HLA (a Her2 peptide bound to an HLA complex comprising an HLA heavy chain and a β2M polypeptide). In some cases, the TTP is a scFv that binds CD19/HLA (a CD19 peptide bound to an HLA complex comprising an HLA heavy chain and a β2M polypeptide). In some cases, the peptide epitope is a peptide of a CMV antigen. In some cases, the peptide epitope is a peptide of a CMV pp65 polypeptide. In some cases, the peptide epitope is a peptide of a CMV gB polypeptide. In some cases, the peptide epitope has the amino acid sequence NLVPMVATV (SEQ ID NO:395) and has a length of 9 amino acids.

[0577] In some cases, a TMMP of the present disclosure comprises: a) a first polypeptide comprising, in order from N-terminus to C-terminus: i) a peptide epitope; and ii) a first MHC polypeptide; and b) a second polypeptide comprising, in order from N-terminus to C-terminus: i) at least one immunomodulatory polypeptide; ii) a second MHC polypeptide; iii) an Ig Fc polypeptide; and iv) a TTP. See, e.g., FIG. 1A. In some cases, the first MHC polypeptide is a β2M polypeptide; and the second MHC polypeptide is an HLA heavy chain polypeptide. In some cases, the HLA heaving chain comprises: a) an amino acid sequence having at least 95% amino acid sequence identity to the HLA-A*0101, HLA-A*0201, HLA-A*0201, HLA-A*1101, HLA-A*2301, HLA-A*2402, HLA-A*2407, HLA-A*3303, or HLA-A*3401 amino acid sequence depicted in FIG. 7A; or b) an amino acid sequence having at least 95% amino acid sequence identity to the HLA-B*0702, HLA-B*0801, HLA-B*1502, HLA-B*3802, HLA-B*4001, HLA-B*4601, or HLA-B*5301 amino acid sequence depicted in FIG. 8A; or c) an amino acid sequence having at least 95% amino acid sequence identity to the HLA-C*0102, HLA-C*0303, HLA-C*0304, HLA-C*0401, HLA-C*0602, HLA-C*0701, HLA-C*0702, HLA-C*0801, or HLA-C*1502 depicted in FIG. 9A.In some cases, the HLA heavy chain polypeptide is an HLA-A*0201 polypeptide. In some cases, the HLA heavy chain polypeptide is an HLA-A24 polypeptide. In some cases, the HLA heavy chain comprises an A236C substitution. In some cases, the HLA heavy chain polypeptide is an HLA-A24 polypeptide with an A236C substitution. In some cases, the second polypeptide comprises, in order from N-terminus to C-terminus: i) two immunomodulatory polypeptides, where the two immunomodulatory polypeptides have the same amino acid sequence; ii) a second MHC polypeptide; iii) an Ig Fc polypeptide; and iv) a TTP. In some cases, the Ig Fc polypeptide is a human IgG1 Fc polypeptide. In some cases, the Ig Fc polypeptide is an IgG1 Fc polypeptide comprising L234A and L235A substitutions. In some cases, the first and the second polypeptides are disulfide linked to one another. In some cases, the first and the second polypeptides are linked to one another by 2 disulfide bonds. In some cases, the immunomodulatory polypeptide comprises a wild-type amino acid sequence; in other cases, the immunomodulatory polypeptide is a variant, e.g., as described above. In some cases, the immunomodulatory polypeptide is a 4-1BBL polypeptide, e.g., a variant 4-1BBL polypeptide. In some cases, the immunomodulatory polypeptide is a variant IL-2 polypeptide. In some cases, the immunomodulatory polypeptide is a 4-1BBL polypeptide. In some cases, the immunomodulatory polypeptide is a variant IL-2 polypeptide comprising H16A and F42A substitutions. In some cases, the immunomodulatory polypeptide is a variant IL-2 polypeptide comprising H16T and F42A substitutions. In some cases, a peptide linker is between one or more of: i) the second MHC polypeptide and the Ig Fc polypeptide; ii) the epitope and the first MHC polypeptide; iii) the first MHC polypeptide and the immunomodulatory polypeptide; iv) (where the TMMP comprises two immunomodulatory polypeptides on the first polypeptide chain) between the two immunomodulatory polypeptides; and v) the Ig Fc polypeptide and the TTP. In some cases, the peptide linker comprises the amino acid sequence AAAGG. In some cases, the peptide linker comprises the amino acid sequence (GGGGS)n, where n is an integer from 1 to 10 (e.g., where n is 2, 3, or 4). In some cases, the peptide epitope present in the TMMP is a cancer-associated peptide. In some cases, the peptide epitope present in a TMMP of the present disclosure is an infectious disease-associated peptide (e.g., a virus-encoded peptide). In some cases, the TTP is an antibody specific for a cancer-associated antigen, e.g., a cancer-associated antigen present on the surface of a cancer cell. In some cases, the TTP is a scFv or a nanobody. In some cases, the TTP is an antibody specific for a cancer-associated peptide/HLA complex (i.e., an HLA heavy chain and a β2M polypeptide) present on the surface of a cancer cell. In some cases, the TTP is a scTCR specific for a cancer-associated antigen, e.g., a cancer-associated antigen present on the surface of a cancer cell. In some cases, the TTP is a scFv that binds Her2/HLA (a Her2 peptide bound to an HLA complex comprising an HLA heavy chain and a β2M polypeptide). In some cases, the TTP is a scFv that binds CD19/HLA (a CD19 peptide bound to an HLA complex comprising an HLA heavy chain and a β2M polypeptide). In some cases, the peptide epitope is a peptide of a CMV antigen. In some cases, the peptide epitope is a peptide of a CMV pp65 polypeptide. In some cases, the peptide epitope is a peptide of a CMV gB polypeptide. In some cases, the peptide epitope has the amino acid sequence NLVPMVATV (SEQ ID NO:395) and has a length of 9 amino acids.

[0578] In some cases, a TMMP of the present disclosure comprises: a) a first polypeptide comprising, in order from N-terminus to C-terminus: i) a peptide epitope; and ii) a first MHC polypeptide; and b) a second polypeptide comprising, in order from N-terminus to C-terminus: i) a second MHC polypeptide; ii) an Ig Fc polypeptide; iii) at least one immunomodulatory polypeptide; and iv) a TTP. See, e.g., FIG. 1F. In some cases, the first MHC polypeptide is a β2M polypeptide; and the second MHC polypeptide is an HLA heavy chain polypeptide. In some cases, the HLA heaving chain comprises: a) an amino acid sequence having at least 95% amino acid sequence identity to the HLA-A*0101, HLA-A*0201, HLA-A*0201, HLA-A*1101, HLA-A*2301, HLA-A*2402, HLA-A*2407, HLA-A*3303, or HLA-A*3401 amino acid sequence depicted in FIG. 7A; or b) an amino acid sequence having at least 95% amino acid sequence identity to the HLA-B*0702, HLA-B*0801, HLA-B*1502, HLA-B*3802, HLA-B*4001, HLA-B*4601, or HLA-B*5301 amino acid sequence depicted in FIG. 8A; or c) an amino acid sequence having at least 95% amino acid sequence identity to the HLA-C*0102, HLA-C*0303, HLA-C*0304, HLA-C*0401, HLA-C*0602, HLA-C*0701, HLA-C*0702, HLA-C*0801, or HLA-C*1502 depicted in FIG. 9A.In some cases, the HLA heavy chain polypeptide is an HLA-A*0201 polypeptide. In some cases, the HLA heavy chain polypeptide is an HLA-A24 polypeptide. In some cases, the HLA heavy chain comprises an A236C substitution. In some cases, the HLA heavy chain polypeptide is an HLA-A24 polypeptide with an A236C substitution. In some cases, the second polypeptide comprises, in order from N-terminus to C-terminus: i) a second MHC polypeptide; ii) an Ig Fc polypeptide; iii) two immunomodulatory polypeptides, where the two immunomodulatory polypeptides have the same amino acid sequence; and iv) a TTP. In some cases, the Ig Fc polypeptide is a human IgG1 Fc polypeptide. In some cases, the Ig Fc polypeptide is an IgG1 Fc polypeptide comprising L234A and L235A substitutions. In some cases, the first and the second polypeptides are disulfide linked to one another. In some cases, the first and the second polypeptides are linked to one another by 2 disulfide bonds. In some cases, the immunomodulatory polypeptide comprises a wild-type amino acid sequence; in other cases, the immunomodulatory polypeptide is a variant, e.g., as described above. In some cases, the immunomodulatory polypeptide is a 4-1BBL polypeptide, e.g., a variant 4-1BBL polypeptide. In some cases, the immunomodulatory polypeptide is a variant IL-2 polypeptide. In some cases, the immunomodulatory polypeptide is a variant IL-2 polypeptide comprising H16A and F42A substitutions. In some cases, the immunomodulatory polypeptide is a variant IL-2 polypeptide comprising H16T and F42A substitutions. In some cases, a peptide linker is between one or more of: i) the second MHC polypeptide and the Ig Fc polypeptide; ii) the epitope and the first MHC polypeptide; iii) the Ig Fc polypeptide and the immunomodulatory polypeptide; iv) (where the TMMP comprises two immunomodulatory polypeptides on the first polypeptide chain) between the two immunomodulatory polypeptides; and v) the Ig Fc polypeptide and the TTP. In some cases, the peptide linker comprises the amino acid sequence AAAGG. In some cases, the peptide linker comprises the amino acid sequence (GGGGS)n, where n is an integer from 1 to 10 (e.g., where n is 2, 3, or 4). In some cases, the peptide epitope present in the TMMP is a cancer-associated peptide. In some cases, the TTP is an antibody specific for a cancer-associated antigen, e.g., a cancer-associated antigen present on the surface of a cancer cell. In some cases, the TTP is a scFv or a nanobody. In some cases, the TTP is an antibody specific for a cancer-associated peptide/HLA complex (i.e., an HLA heavy chain and a β2M polypeptide) present on the surface of a cancer cell. In some cases, the TTP is a scTCR specific for a cancer-associated antigen, e.g., a cancer-associated antigen present on the surface of a cancer cell. In some cases, the TTP is a scFv that binds Her2/HLA (a Her2 peptide bound to an HLA complex comprising an HLA heavy chain and a β2M polypeptide). In some cases, the TTP is a scFv that binds CD19/HLA (a CD19 peptide bound to an HLA complex comprising an HLA heavy chain and a β2M polypeptide). In some cases, the peptide epitope is a peptide of a CMV antigen. In some cases, the peptide epitope is a peptide of a CMV pp65 polypeptide. In some cases, the peptide epitope is a peptide of a CMV gB polypeptide. In some cases, the peptide epitope has the amino acid sequence NLVPMVATV (SEQ ID NO:395) and has a length of 9 amino acids.

[0579] In some cases, a TMMP of the present disclosure comprises: a) a first polypeptide comprising, in order from N-terminus to C-terminus: i) a peptide epitope; and ii) a first MHC polypeptide; and b) a second polypeptide comprising, in order from N-terminus to C-terminus: i) at least one immunomodulatory polypeptide; ii) a second MHC polypeptide; iii) an Ig Fc polypeptide; and iv) a TTP. See, e.g., FIG. 1B. In some cases, the first MHC polypeptide is a β2M polypeptide; and the second MHC polypeptide is an HLA heavy chain polypeptide. In some cases, the HLA heaving chain comprises: a) an amino acid sequence having at least 95% amino acid sequence identity to the HLA-A*0101, HLA-A*0201, HLA-A*0201, HLA-A*1101, HLA-A*2301, HLA-A*2402, HLA-A*2407, HLA-A*3303, or HLA-A*3401 amino acid sequence depicted in FIG. 7A; or b) an amino acid sequence having at least 95% amino acid sequence identity to the HLA-B*0702, HLA-B*0801, HLA-B*1502, HLA-B*3802, HLA-B*4001, HLA-B*4601, or HLA-B*5301 amino acid sequence depicted in FIG. 8A; or c) an amino acid sequence having at least 95% amino acid sequence identity to the HLA-C*0102, HLA-C*0303, HLA-C*0304, HLA-C*0401, HLA-C*0602, HLA-C*0701, HLA-C*0702, HLA-C*0801, or HLA-C*1502 depicted in FIG. 9A.In some cases, the HLA heavy chain polypeptide is an HLA-A*0201 polypeptide. In some cases, the HLA heavy chain polypeptide is an HLA-A24 polypeptide. In some cases, the HLA heavy chain comprises an A236C substitution. In some cases, the Ig Fc polypeptide is a human IgG1 Fc polypeptide. In some cases, the Ig Fc polypeptide is an IgG1 Fc polypeptide comprising L234A and L235A substitutions. In some cases, the first and the second polypeptides are disulfide linked to one another. In some cases, the first and the second polypeptides are linked to one another by 2 disulfide bonds. In some cases, the immunomodulatory polypeptide comprises a wild-type amino acid sequence; in other cases, the immunomodulatory polypeptide is a variant, e.g., as described above. In some cases, the immunomodulatory polypeptide is a 4-1BBL polypeptide, e.g., a variant 4-1BBL polypeptide. In some cases, the immunomodulatory polypeptide is a variant IL-2 polypeptide. In some cases, the immunomodulatory polypeptide is a variant IL-2 polypeptide comprising H16A and F42A substitutions. In some cases, the immunomodulatory polypeptide is a variant IL-2 polypeptide comprising H16T and F42A substitutions. In some cases, a peptide linker is between one or more of: i) the second MHC polypeptide and the Ig Fc polypeptide; ii) the epitope and the first MHC polypeptide; iii) the first MHC polypeptide and the immunomodulatory polypeptide; iv) (where the TMMP comprises two immunomodulatory polypeptides on the first polypeptide chain) between the two immunomodulatory polypeptides; and v) the Ig Fc polypeptide and the TTP. In some cases, the peptide linker comprises the amino acid sequence AAAGG. In some cases, the peptide linker comprises the amino acid sequence (GGGGS)n, where n is an integer from 1 to 10 (e.g., where n is 2, 3, or 4). In some cases, the peptide epitope present in the TMMP is a cancer-associated peptide. In some cases, the peptide epitope present in a TMMP of the present disclosure is an infectious disease-associated peptide (e.g., a virus-encoded peptide). In some cases, the TTP is an antibody specific for a cancer-associated antigen, e.g., a cancer-associated antigen present on the surface of a cancer cell. In some cases, the TTP is a scFv or a nanobody. In some cases, the TTP is an antibody specific for a cancer-associated peptide/HLA complex (i.e., an HLA heavy chain and a β2M polypeptide) present on the surface of a cancer cell. In some cases, the TTP is a scTCR specific for a cancer-associated antigen, e.g., a cancer-associated antigen present on the surface of a cancer cell. In some cases, the TTP is a scFv that binds Her2/HLA (a Her2 peptide bound to an HLA complex comprising an HLA heavy chain and a β2M polypeptide). In some cases, the TTP is a scFv that binds CD19/HLA (a CD19 peptide bound to an HLA complex comprising an HLA heavy chain and a β2M polypeptide). In some cases, the peptide epitope is a peptide of a CMV antigen. In some cases, the peptide epitope is a peptide of a CMV pp65 polypeptide. In some cases, the peptide epitope is a peptide of a CMV gB polypeptide. In some cases, the peptide epitope has the amino acid sequence NLVPMVATV (SEQ ID NO:395) and has a length of 9 amino acids.

[0580] In some cases, a TMMP of the present disclosure comprises: a) a first polypeptide comprising, in order from N-terminus to C-terminus: i) at least one immunomodulatory polypeptide; ii) a peptide epitope; and iii) a first MHC polypeptide; and b) a second polypeptide comprising, in order from N-terminus to C-terminus: i) a second MHC polypeptide; ii) an Ig Fc polypeptide; and iii) a TTP. See, e.g., FIG. 1D. In some cases, the first MHC polypeptide is a β2M polypeptide; and the second MHC polypeptide is an HLA heavy chain polypeptide. In some cases, the HLA heaving chain comprises: a) an amino acid sequence having at least 95% amino acid sequence identity to the HLA-A*0101, HLA-A*0201, HLA-A*0201, HLA-A*1101, HLA-A*2301, HLA-A*2402, HLA-A*2407, HLA-A*3303, or HLA-A*3401 amino acid sequence depicted in FIG. 7A; or b) an amino acid sequence having at least 95% amino acid sequence identity to the HLA-B*0702, HLA-B*0801, HLA-B*1502, HLA-B*3802, HLA-B*4001, HLA-B*4601, or HLA-B*5301 amino acid sequence depicted in FIG. 8A; or c) an amino acid sequence having at least 95% amino acid sequence identity to the HLA-C*0102, HLA-C*0303, HLA-C*0304, HLA-C*0401, HLA-C*0602, HLA-C*0701, HLA-C*0702, HLA-C*0801, or HLA-C*1502 depicted in FIG. 9A.In some cases, the HLA heavy chain polypeptide is an HLA-A*0201 polypeptide. In some cases, the HLA heavy chain polypeptide is an HLA-A24 polypeptide. In some cases, the HLA heavy chain comprises an A236C substitution. In some cases, the first polypeptide comprises, in order from N-terminus to C-terminus: i) two immunomodulatory polypeptides, where the two immunomodulatory polypeptides have the same amino acid sequence; ii) a peptide epitope; and iii) a first MHC polypeptide. In some cases, the Ig Fc polypeptide is a human IgG1 Fc polypeptide. In some cases, the Ig Fc polypeptide is an IgG1 Fc polypeptide comprising L234A and L235A substitutions. In some cases, the first and the second polypeptides are disulfide linked to one another. In some cases, the first and the second polypeptides are linked to one another by 2 disulfide bonds. In some cases, the immunomodulatory polypeptide comprises a wild-type amino acid sequence; in other cases, the immunomodulatory polypeptide is a variant, e.g., as described above. In some cases, the immunomodulatory polypeptide is a 4-1BBL polypeptide, e.g., a variant 4-1BBL polypeptide. In some cases, the immunomodulatory polypeptide is a variant IL-2 polypeptide. In some cases, the immunomodulatory polypeptide is a variant IL-2 polypeptide comprising H16A and F42A substitutions. In some cases, the immunomodulatory polypeptide is a variant IL-2 polypeptide comprising H16T and F42A substitutions. In some cases, a peptide linker is between one or more of: i) the second MHC polypeptide and the Ig Fc polypeptide; ii) the epitope and the first MHC polypeptide; iii) the first MHC polypeptide and the immunomodulatory polypeptide; iv) (where the TMMP comprises two immunomodulatory polypeptides on the first polypeptide chain) between the two immunomodulatory polypeptides; and v) the Ig Fc polypeptide and the TTP. In some cases, the peptide linker comprises the amino acid sequence AAAGG. In some cases, the peptide linker comprises the amino acid sequence (GGGGS)n, where n is an integer from 1 to 10 (e.g., where n is 2, 3, or 4). In some cases, the peptide epitope present in the TMMP is a cancer-associated peptide. In some cases, the peptide epitope present in a TMMP of the present disclosure is an infectious disease-associated peptide (e.g., a virus-encoded peptide). In some cases, the TTP is an antibody specific for a cancer-associated antigen, e.g., a cancer-associated antigen present on the surface of a cancer cell. In some cases, the TTP is a scFv or a nanobody. In some cases, the TTP is an antibody specific for a cancer-associated peptide/HLA complex (i.e., an HLA heavy chain and a β2M polypeptide) present on the surface of a cancer cell. In some cases, the TTP is a scTCR specific for a cancer-associated antigen, e.g., a cancer-associated antigen present on the surface of a cancer cell. In some cases, the TTP is a scFv that binds Her2/HLA (a Her2 peptide bound to an HLA complex comprising an HLA heavy chain and a β2M polypeptide). In some cases, the TTP is a scFv that binds CD19/HLA (a CD19 peptide bound to an HLA complex comprising an HLA heavy chain and a β2M polypeptide). In some cases, the peptide epitope is a peptide of a CMV antigen. In some cases, the peptide epitope is a peptide of a CMV pp65 polypeptide. In some cases, the peptide epitope is a peptide of a CMV gB polypeptide. In some cases, the peptide epitope has the amino acid sequence NLVPMVATV (SEQ ID NO:395) and has a length of 9 amino acids.

[0581] In some cases, a TMMP of the present disclosure comprises: a) a first polypeptide comprising, in order from N-terminus to C-terminus: i) a peptide epitope; and ii) a first MHC polypeptide; and b) a second polypeptide comprising, in order from N-terminus to C-terminus: i) a second MHC polypeptide; ii) at least one immunomodulatory polypeptide; iii) an Ig Fc polypeptide; and iv) a TTP. See, e.g., FIG. 1E. In some cases, the first MHC polypeptide is a β2M polypeptide; and the second MHC polypeptide is an HLA heavy chain polypeptide. In some cases, the HLA heaving chain comprises: a) an amino acid sequence having at least 95% amino acid sequence identity to the HLA-A*0101, HLA-A*0201, HLA-A*0201, HLA-A*1101, HLA-A*2301, HLA-A*2402, HLA-A*2407, HLA-A*3303, or HLA-A*3401 amino acid sequence depicted in FIG. 7A; or b) an amino acid sequence having at least 95% amino acid sequence identity to the HLA-B*0702, HLA-B*0801, HLA-B*1502, HLA-B*3802, HLA-B*4001, HLA-B*4601, or HLA-B*5301 amino acid sequence depicted in FIG. 8A; or c) an amino acid sequence having at least 95% amino acid sequence identity to the HLA-C*0102, HLA-C*0303, HLA-C*0304, HLA-C*0401, HLA-C*0602, HLA-C*0701, HLA-C*0702, HLA-C*0801, or HLA-C*1502 depicted in FIG. 9A.In some cases, the HLA heavy chain polypeptide is an HLA-A*0201 polypeptide. In some cases, the HLA heavy chain polypeptide is an HLA-A24 polypeptide. In some cases, the HLA heavy chain comprises an A236C substitution. In some cases, the HLA heavy chain polypeptide is an HLA-A24 polypeptide with an A236C substitution. In some cases, the second polypeptide comprises, in order from N-terminus to C-terminus: i) a second MHC polypeptide; ii) two immunomodulatory polypeptides, where the two immunomodulatory polypeptides have the same amino acid sequence; iii) an Ig Fc polypeptide; and iv) a TTP. In some cases, the Ig Fc polypeptide is a human IgG1 Fc polypeptide. In some cases, the Ig Fc polypeptide is an IgG1 Fc polypeptide comprising L234A and L235A substitutions. In some cases, the first and the second polypeptides are disulfide linked to one another. In some cases, the first and the second polypeptides are linked to one another by 2 disulfide bonds. In some cases, the immunomodulatory polypeptide comprises a wild-type amino acid sequence; in other cases, the immunomodulatory polypeptide is a variant, e.g., as described above. In some cases, the immunomodulatory polypeptide is a 4-1BBL polypeptide, e.g., a variant 4-1BBL polypeptide. In some cases, the immunomodulatory polypeptide is a variant IL-2 polypeptide. In some cases, the immunomodulatory polypeptide is a variant IL-2 polypeptide comprising H16A and F42A substitutions. In some cases, the immunomodulatory polypeptide is a variant IL-2 polypeptide comprising H16T and F42A substitutions. In some cases, a peptide linker is between one or more of: i) the second MHC polypeptide and the Ig Fc polypeptide; ii) the epitope and the first MHC polypeptide; iii) the first MHC polypeptide and the immunomodulatory polypeptide; iv) (where the TMMP comprises two immunomodulatory polypeptides on the first polypeptide chain) between the two immunomodulatory polypeptides; and v) the Ig Fc polypeptide and the TTP. In some cases, the peptide linker comprises the amino acid sequence AAAGG. In some cases, the peptide linker comprises the amino acid sequence (GGGGS)n, where n is an integer from 1 to 10 (e.g., where n is 2, 3, or 4). In some cases, the peptide epitope present in the TMMP is a cancer-associated peptide. In some cases, the peptide epitope present in a TMMP of the present disclosure is an infectious disease-associated peptide (e.g., a virus-encoded peptide). In some cases, the TTP is an antibody specific for a cancer-associated antigen, e.g., a cancer-associated antigen present on the surface of a cancer cell. In some cases, the TTP is a scFv or a nanobody. In some cases, the TTP is an antibody specific for a cancer-associated peptide/HLA complex (i.e., an HLA heavy chain and a β2M polypeptide) present on the surface of a cancer cell. In some cases, the TTP is a scTCR specific for a cancer-associated antigen, e.g., a cancer-associated antigen present on the surface of a cancer cell. In some cases, the TTP is a scFv that binds Her2/HLA (a Her2 peptide bound to an HLA complex comprising an HLA heavy chain and a β2M polypeptide). In some cases, the TTP is a scFv that binds CD19/HLA (a CD19 peptide bound to an HLA complex comprising an HLA heavy chain and a β2M polypeptide). In some cases, the peptide epitope is a peptide of a CMV antigen. In some cases, the peptide epitope is a peptide of a CMV pp65 polypeptide. In some cases, the peptide epitope is a peptide of a CMV gB polypeptide. In some cases, the peptide epitope has the amino acid sequence NLVPMVATV (SEQ ID NO:395) and has a length of 9 amino acids.

[0582] In some cases, a TMMP of the present disclosure comprises: a) a first polypeptide comprising, in order from N-terminus to C-terminus: i) a peptide epitope; ii) a first MHC polypeptide; and iii) at least one immunomodulatory polypeptide; and b) a second polypeptide comprising, in order from N-terminus to C-terminus: i) at least one immunomodulatory polypeptide; ii) a second MHC polypeptide; iii) an Ig Fc polypeptide; and iv) a TTP. In some cases, the first MHC polypeptide is a β2M polypeptide; and the second MHC polypeptide is an HLA heavy chain polypeptide. In some cases, the HLA heaving chain comprises: a) an amino acid sequence having at least 95% amino acid sequence identity to the HLA-A*0101, HLA-A*0201, HLA-A*0201, HLA-A*1101, HLA-A*2301, HLA-A*2402, HLA-A*2407, HLA-A*3303, or HLA-A*3401 amino acid sequence depicted in FIG. 7A; or b) an amino acid sequence having at least 95% amino acid sequence identity to the HLA-B*0702, HLA-B*0801, HLA-B*1502, HLA-B*3802, HLA-B*4001, HLA-B*4601, or HLA-B*5301 amino acid sequence depicted in FIG. 8A; or c) an amino acid sequence having at least 95% amino acid sequence identity to the HLA-C*0102, HLA-C*0303, HLA-C*0304, HLA-C*0401, HLA-C*0602, HLA-C*0701, HLA-C*0702, HLA-C*0801, or HLA-C*1502 depicted in FIG. 9A.In some cases, the HLA heavy chain polypeptide is an HLA-A*0201 polypeptide. In some cases, the HLA heavy chain polypeptide is an HLA-A24 polypeptide. In some cases, the HLA heavy chain comprises an A236C substitution. In some cases, the HLA heavy chain polypeptide is an HLA-A24 polypeptide with an A236C substitution. In some cases, the second polypeptide comprises, in order from N-terminus to C-terminus: i) two immunomodulatory polypeptides, where the two immunomodulatory polypeptides have the same amino acid sequence; ii) a second MHC polypeptide; iii) an Ig Fc polypeptide; and iv) a TTP. In some cases, the Ig Fc polypeptide is a human IgG1 Fc polypeptide. In some cases, the Ig Fc polypeptide is an IgG1 Fc polypeptide comprising L234A and L235A substitutions. In some cases, the first and the second polypeptides are disulfide linked to one another. In some cases, the first and the second polypeptides are linked to one another by 2 disulfide bonds. In some cases, the immunomodulatory polypeptide comprises a wild-type amino acid sequence; in other cases, the immunomodulatory polypeptide is a variant, e.g., as described above. In some cases, the immunomodulatory polypeptide is a 4-1BBL polypeptide, e.g., a variant 4-1BBL polypeptide. In some cases, the immunomodulatory polypeptide is a variant IL-2 polypeptide. In some cases, the immunomodulatory polypeptide is a variant IL-2 polypeptide comprising H16A and F42A substitutions. In some cases, the immunomodulatory polypeptide is a variant IL-2 polypeptide comprising H16T and F42A substitutions. In some cases, a peptide linker is between one or more of: i) the second MHC polypeptide and the Ig Fc polypeptide; ii) the epitope and the first MHC polypeptide; iii) the first MHC polypeptide and the immunomodulatory polypeptide; iv) (where the TMMP comprises two immunomodulatory polypeptides on the first polypeptide chain) between the two immunomodulatory polypeptides; and v) the Ig Fc polypeptide and the TTP. In some cases, the peptide linker comprises the amino acid sequence AAAGG. In some cases, the peptide linker comprises the amino acid sequence (GGGGS)n, where n is an integer from 1 to 10 (e.g., where n is 2, 3, or 4). In some cases, the peptide epitope present in the TMMP is a cancer-associated peptide. In some cases, the peptide epitope present in a TMMP of the present disclosure is an infectious disease-associated peptide (e.g., a virus-encoded peptide). In some cases, the TTP is an antibody specific for a cancer-associated antigen, e.g., a cancer-associated antigen present on the surface of a cancer cell. In some cases, the TTP is a scFv or a nanobody. In some cases, the TTP is an antibody specific for a cancer-associated peptide/HLA complex (i.e., an HLA heavy chain and a β2M polypeptide) present on the surface of a cancer cell. In some cases, the TTP is a scTCR specific for a cancer-associated antigen, e.g., a cancer-associated antigen present on the surface of a cancer cell. In some cases, the TTP is a scFv that binds Her2/HLA (a Her2 peptide bound to an HLA complex comprising an HLA heavy chain and a β2M polypeptide). In some cases, the TTP is a scFv that binds CD19/HLA (a CD19 peptide bound to an HLA complex comprising an HLA heavy chain and a β2M polypeptide). In some cases, the peptide epitope is a peptide of a CMV antigen. In some cases, the peptide epitope is a peptide of a CMV pp65 polypeptide. In some cases, the peptide epitope is a peptide of a CMV gB polypeptide. In some cases, the peptide epitope has the amino acid sequence NLVPMVATV (SEQ ID NO:395) and has a length of 9 amino acids.

[0583] In some cases, a TMMP of the present disclosure comprises: a) a first polypeptide comprising, in order from N-terminus to C-terminus: i) a peptide epitope; ii) a first MHC polypeptide; and iii) at least one immunomodulatory polypeptide; and b) a second polypeptide comprising, in order from N-terminus to C-terminus: i) a second MHC polypeptide; ii) at least one immunomodulatory polypeptide; iii) an Ig Fc polypeptide; and iv) a TTP. In some cases, the first MHC polypeptide is a β2M polypeptide; and the second MHC polypeptide is an HLA heavy chain polypeptide. In some cases, the HLA heaving chain comprises: a) an amino acid sequence having at least 95% amino acid sequence identity to the HLA-A*0101, HLA-A*0201, HLA-A*0201, HLA-A*1101, HLA-A*2301, HLA-A*2402, HLA-A*2407, HLA-A*3303, or HLA-A*3401 amino acid sequence depicted in FIG. 7A; or b) an amino acid sequence having at least 95% amino acid sequence identity to the HLA-B*0702, HLA-B*0801, HLA-B*1502, HLA-B*3802, HLA-B*4001, HLA-B*4601, or HLA-B*5301 amino acid sequence depicted in FIG. 8A; or c) an amino acid sequence having at least 95% amino acid sequence identity to the HLA-C*0102, HLA-C*0303, HLA-C*0304, HLA-C*0401, HLA-C*0602, HLA-C*0701, HLA-C*0702, HLA-C*0801, or HLA-C*1502 depicted in FIG. 9A.In some cases, the HLA heavy chain polypeptide is an HLA-A*0201 polypeptide. In some cases, the HLA heavy chain polypeptide is an HLA-A24 polypeptide. In some cases, the HLA heavy chain comprises an A236C substitution. In some cases, the HLA heavy chain polypeptide is an HLA-A24 polypeptide with an A236C substitution. In some cases, the second polypeptide comprises, in order from N-terminus to C-terminus: i) a second MHC polypeptide; ii) two immunomodulatory polypeptides, where the two immunomodulatory polypeptides have the same amino acid sequence; iii) an Ig Fc polypeptide; and iv) a TTP. In some cases, the Ig Fc polypeptide is a human IgG1 Fc polypeptide. In some cases, the Ig Fc polypeptide is an IgG1 Fc polypeptide comprising L234A and L235A substitutions. In some cases, the first and the second polypeptides are disulfide linked to one another. In some cases, the first and the second polypeptides are linked to one another by 2 disulfide bonds. In some cases, the immunomodulatory polypeptide comprises a wild-type amino acid sequence; in other cases, the immunomodulatory polypeptide is a variant, e.g., as described above. In some cases, the immunomodulatory polypeptide is a 4-1BBL polypeptide, e.g., a variant 4-1BBL polypeptide. In some cases, the immunomodulatory polypeptide is a variant IL-2 polypeptide. In some cases, the immunomodulatory polypeptide is a variant IL-2 polypeptide comprising H16A and F42A substitutions. In some cases, the immunomodulatory polypeptide is a variant IL-2 polypeptide comprising H16T and F42A substitutions. In some cases, a peptide linker is between one or more of: i) the second MHC polypeptide and the Ig Fc polypeptide; ii) the epitope and the first MHC polypeptide; iii) the first MHC polypeptide and the immunomodulatory polypeptide; iv) (where the TMMP comprises two immunomodulatory polypeptides on the first polypeptide chain) between the two immunomodulatory polypeptides; and v) the Ig Fc polypeptide and the TTP. In some cases, the peptide linker comprises the amino acid sequence AAAGG. In some cases, the peptide linker comprises the amino acid sequence (GGGGS)n, where n is an integer from 1 to 10 (e.g., where n is 2, 3, or 4). In some cases, the peptide epitope present in the TMMP is a cancer-associated peptide. In some cases, the peptide epitope present in a TMMP of the present disclosure is an infectious disease-associated peptide (e.g., a virus-encoded peptide). In some cases, the TTP is an antibody specific for a cancer-associated antigen, e.g., a cancer-associated antigen present on the surface of a cancer cell. In some cases, the TTP is a scFv or a nanobody. In some cases, the TTP is an antibody specific for a cancer-associated peptide/HLA complex (i.e., an HLA heavy chain and a β2M polypeptide) present on the surface of a cancer cell. In some cases, the TTP is a scTCR specific for a cancer-associated antigen, e.g., a cancer-associated antigen present on the surface of a cancer cell. In some cases, the TTP is a scFv that binds Her2/HLA (a Her2 peptide bound to an HLA complex comprising an HLA heavy chain and a β2M polypeptide). In some cases, the TTP is a scFv that binds CD19/HLA (a CD19 peptide bound to an HLA complex comprising an HLA heavy chain and a β2M polypeptide). In some cases, the peptide epitope is a peptide of a CMV antigen. In some cases, the peptide epitope is a peptide of a CMV pp65 polypeptide. In some cases, the peptide epitope is a peptide of a CMV gB polypeptide. In some cases, the peptide epitope has the amino acid sequence NLVPMVATV (SEQ ID NO:395) and has a length of 9 amino acids.

[0584] In some cases, a TMMP of the present disclosure comprises: a) a first polypeptide comprising, in order from N-terminus to C-terminus: i) a peptide epitope; and ii) a first MHC polypeptide; and b) a second polypeptide comprising, in order from N-terminus to C-terminus: i) a TTP; ii) a second MHC polypeptide; iii) an Ig Fc polypeptide; and iv) at least one immunomodulatory polypeptide. See, e.g., FIG. 1G. In some cases, the first MHC polypeptide is a β2M polypeptide; and the second MHC polypeptide is an HLA heavy chain polypeptide. In some cases, the HLA heaving chain comprises: a) an amino acid sequence having at least 95% amino acid sequence identity to the HLA-A*0101, HLA-A*0201, HLA-A*0201, HLA-A*1101, HLA-A*2301, HLA-A*2402, HLA-A*2407, HLA-A*3303, or HLA-A*3401 amino acid sequence depicted in FIG. 7A; or b) an amino acid sequence having at least 95% amino acid sequence identity to the HLA-B*0702, HLA-B*0801, HLA-B*1502, HLA-B*3802, HLA-B*4001, HLA-B*4601, or HLA-B*5301 amino acid sequence depicted in FIG. 8A; or c) an amino acid sequence having at least 95% amino acid sequence identity to the HLA-C*0102, HLA-C*0303, HLA-C*0304, HLA-C*0401, HLA-C*0602, HLA-C*0701, HLA-C*0702, HLA-C*0801, or HLA-C*1502 depicted in FIG. 9A.In some cases, the HLA heavy chain polypeptide is an HLA-A*0201 polypeptide. In some cases, the HLA heavy chain polypeptide is an HLA-A24 polypeptide. In some cases, the HLA heavy chain comprises an A236C substitution. In some cases, the HLA heavy chain polypeptide is an HLA-A24 polypeptide with an A236C substitution. In some cases, the Ig Fc polypeptide is a human IgG1 Fc polypeptide. In some cases, the Ig Fc polypeptide is an IgG1 Fc polypeptide comprising L234A and L235A substitutions. In some cases, the first and the second polypeptides are disulfide linked to one another. In some cases, the first and the second polypeptides are linked to one another by 2 disulfide bonds. In some cases, the immunomodulatory polypeptide comprises a wild-type amino acid sequence; in other cases, the immunomodulatory polypeptide is a variant, e.g., as described above. In some cases, the immunomodulatory polypeptide is a 4-1BBL polypeptide, e.g., a variant 4-1BBL polypeptide. In some cases, the immunomodulatory polypeptide is a variant IL-2 polypeptide. In some cases, the immunomodulatory polypeptide is a variant IL-2 polypeptide comprising H16A and F42A substitutions. In some cases, the immunomodulatory polypeptide is a variant IL-2 polypeptide comprising H16T and F42A substitutions. In some cases, a peptide linker is between one or more of: i) the second MHC polypeptide and the Ig Fc polypeptide; ii) the epitope and the first MHC polypeptide; iii) the first MHC polypeptide and the immunomodulatory polypeptide; iv) (where the TMMP comprises two immunomodulatory polypeptides on the first polypeptide chain) between the two immunomodulatory polypeptides; and v) the Ig Fc polypeptide and the TTP. In some cases, the peptide linker comprises the amino acid sequence AAAGG. In some cases, the peptide linker comprises the amino acid sequence (GGGGS)n, where n is an integer from 1 to 10 (e.g., where n is 2, 3, or 4). In some cases, the peptide epitope present in the TMMP is a cancer-associated peptide. In some cases, the peptide epitope present in a TMMP of the present disclosure is an infectious disease-associated peptide (e.g., a virus-encoded peptide). In some cases, the TTP is an antibody specific for a cancer-associated antigen, e.g., a cancer-associated antigen present on the surface of a cancer cell. In some cases, the TTP is a scFv or a nanobody. In some cases, the TTP is an antibody specific for a cancer-associated peptide/HLA complex (i.e., an HLA heavy chain and a β2M polypeptide) present on the surface of a cancer cell. In some cases, the TTP is a scTCR specific for a cancer-associated antigen, e.g., a cancer-associated antigen present on the surface of a cancer cell. In some cases, the TTP is a scFv that binds Her2/HLA (a Her2 peptide bound to an HLA complex comprising an HLA heavy chain and a β2M polypeptide). In some cases, the TTP is a scFv that binds CD19/HLA (a CD19 peptide bound to an HLA complex comprising an HLA heavy chain and a β2M polypeptide). In some cases, the peptide epitope is a peptide of a CMV antigen. In some cases, the peptide epitope is a peptide of a CMV pp65 polypeptide. In some cases, the peptide epitope is a peptide of a CMV gB polypeptide. In some cases, the peptide epitope has the amino acid sequence NLVPMVATV (SEQ ID NO:395) and has a length of 9 amino acids.

[0585] In some cases, a TMMP of the present disclosure comprises: a) a first polypeptide comprising, in order from N-terminus to C-terminus: i) a peptide epitope; and ii) a first MHC polypeptide; and b) a second polypeptide comprising, in order from N-terminus to C-terminus: i) a TTP; ii) a second MHC polypeptide; iii) at least one immunomodulatory polypeptide; and iv) an Ig Fc polypeptide. See, e.g., FIG. 1H. In some cases, the HLA heaving chain comprises: a) an amino acid sequence having at least 95% amino acid sequence identity to the HLA-A*0101, HLA-A*0201, HLA-A*0201, HLA-A*1101, HLA-A*2301, HLA-A*2402, HLA-A*2407, HLA-A*3303, or HLA-A*3401 amino acid sequence depicted in FIG. 7A; or b) an amino acid sequence having at least 95% amino acid sequence identity to the HLA-B*0702, HLA-B*0801, HLA-B*1502, HLA-B*3802, HLA-B*4001, HLA-B*4601, or HLA-B*5301 amino acid sequence depicted in FIG. 8A; or c) an amino acid sequence having at least 95% amino acid sequence identity to the HLA-C*0102, HLA-C*0303, HLA-C*0304, HLA-C*0401, HLA-C*0602, HLA-C*0701, HLA-C*0702, HLA-C*0801, or HLA-C*1502 depicted in FIG. 9A.In some cases, the HLA heavy chain polypeptide is an HLA-A*0201 polypeptide. In some cases, the HLA heavy chain polypeptide is an HLA-A24 polypeptide. In some cases, the HLA heavy chain comprises an A236C substitution. In some cases, the HLA heavy chain polypeptide is an HLA-A24 polypeptide with an A236C substitution. In some cases, the Ig Fc polypeptide is a human IgG1 Fc polypeptide. In some cases, the Ig Fc polypeptide is an IgG1 Fc polypeptide comprising L234A and L235A substitutions. In some cases, the first and the second polypeptides are disulfide linked to one another. In some cases, the first and the second polypeptides are linked to one another by 2 disulfide bonds. In some cases, the immunomodulatory polypeptide comprises a wild-type amino acid sequence; in other cases, the immunomodulatory polypeptide is a variant, e.g., as described above. In some cases, the immunomodulatory polypeptide is a 4-1BBL polypeptide, e.g., a variant 4-1BBL polypeptide. In some cases, the immunomodulatory polypeptide is a variant IL-2 polypeptide. In some cases, the immunomodulatory polypeptide is a variant IL-2 polypeptide comprising H16A and F42A substitutions. In some cases, the immunomodulatory polypeptide is a variant IL-2 polypeptide comprising H16T and F42A substitutions. In some cases, a peptide linker is between one or more of: i) the second MHC polypeptide and the Ig Fc polypeptide; ii) the epitope and the first MHC polypeptide; iii) the first MHC polypeptide and the immunomodulatory polypeptide; iv) (where the TMMP comprises two immunomodulatory polypeptides on the first polypeptide chain) between the two immunomodulatory polypeptides; and v) the Ig Fc polypeptide and the TTP. In some cases, the peptide linker comprises the amino acid sequence AAAGG. In some cases, the peptide linker comprises the amino acid sequence (GGGGS)n, where n is an integer from 1 to 10 (e.g., where n is 2, 3, or 4). In some cases, the peptide epitope present in the TMMP is a cancer-associated peptide. In some cases, the peptide epitope present in a TMMP of the present disclosure is an infectious disease-associated peptide (e.g., a virus-encoded peptide). In some cases, the TTP is an antibody specific for a cancer-associated antigen, e.g., a cancer-associated antigen present on the surface of a cancer cell. In some cases, the TTP is a scFv or a nanobody. In some cases, the TTP is an antibody specific for a cancer-associated peptide/HLA complex (i.e., an HLA heavy chain and a β2M polypeptide) present on the surface of a cancer cell. In some cases, the TTP is a scTCR specific for a cancer-associated antigen, e.g., a cancer-associated antigen present on the surface of a cancer cell. In some cases, the TTP is a scFv that binds Her2/HLA (a Her2 peptide bound to an HLA complex comprising an HLA heavy chain and a β2M polypeptide). In some cases, the TTP is a scFv that binds CD19/HLA (a CD19 peptide bound to an HLA complex comprising an HLA heavy chain and a β2M polypeptide). In some cases, the peptide epitope is a peptide of a CMV antigen. In some cases, the peptide epitope is a peptide of a CMV pp65 polypeptide. In some cases, the peptide epitope is a peptide of a CMV gB polypeptide. In some cases, the peptide epitope has the amino acid sequence NLVPMVATV (SEQ ID NO:395) and has a length of 9 amino acids.

[0586] In some cases, a TMMP of the present disclosure comprises: a) a first polypeptide comprising, in order from N-terminus to C-terminus: i) a peptide epitope; ii) a first MHC polypeptide; and iii) a TTP; and b) a second polypeptide comprising, in order from N-terminus to C-terminus: i) at least one immunomodulatory polypeptide; ii) a second MHC polypeptide; iii) an Ig Fc polypeptide. See, e.g., FIG. 1I. In some cases, the HLA heaving chain comprises: a) an amino acid sequence having at least 95% amino acid sequence identity to the HLA-A*0101, HLA-A*0201, HLA-A*0201, HLA-A*1101, HLA-A*2301, HLA-A*2402, HLA-A*2407, HLA-A*3303, or HLA-A*3401 amino acid sequence depicted in FIG. 7A; or b) an amino acid sequence having at least 95% amino acid sequence identity to the HLA-B*0702, HLA-B*0801, HLA-B*1502, HLA-B*3802, HLA-B*4001, HLA-B*4601, or HLA-B*5301 amino acid sequence depicted in FIG. 8A; or c) an amino acid sequence having at least 95% amino acid sequence identity to the HLA-C*0102, HLA-C*0303, HLA-C*0304, HLA-C*0401, HLA-C*0602, HLA-C*0701, HLA-C*0702, HLA-C*0801, or HLA-C*1502 depicted in FIG. 9A.In some cases, the HLA heavy chain polypeptide is an HLA-A*0201 polypeptide. In some cases, the HLA heavy chain polypeptide is an HLA-A24 polypeptide. In some cases, the HLA heavy chain comprises an A236C substitution. In some cases, the HLA heavy chain polypeptide is an HLA-A24 polypeptide with an A236C substitution. In some cases, the Ig Fc polypeptide is a human IgG1 Fc polypeptide. In some cases, the Ig Fc polypeptide is an IgG1 Fc polypeptide comprising L234A and L235A substitutions. In some cases, the first and the second polypeptides are disulfide linked to one another. In some cases, the first and the second polypeptides are linked to one another by 2 disulfide bonds. In some cases, the immunomodulatory polypeptide comprises a wild-type amino acid sequence; in other cases, the immunomodulatory polypeptide is a variant, e.g., as described above. In some cases, the immunomodulatory polypeptide is a 4-1BBL polypeptide, e.g., a variant 4-1BBL polypeptide. In some cases, the immunomodulatory polypeptide is a variant IL-2 polypeptide. In some cases, the immunomodulatory polypeptide is a variant IL-2 polypeptide comprising H16A and F42A substitutions. In some cases, the immunomodulatory polypeptide is a variant IL-2 polypeptide comprising H16T and F42A substitutions. In some cases, a peptide linker is between one or more of: i) the second MHC polypeptide and the Ig Fc polypeptide; ii) the epitope and the first MHC polypeptide; iii) the first MHC polypeptide and the immunomodulatory polypeptide; iv) (where the TMMP comprises two immunomodulatory polypeptides on the first polypeptide chain) between the two immunomodulatory polypeptides; and v) the Ig Fc polypeptide and the TTP. In some cases, the peptide linker comprises the amino acid sequence AAAGG. In some cases, the peptide linker comprises the amino acid sequence (GGGGS)n, where n is an integer from 1 to 10 (e.g., where n is 2, 3, or 4). In some cases, the peptide epitope present in the TMMP is a cancer-associated peptide. In some cases, the peptide epitope present in a TMMP of the present disclosure is an infectious disease-associated peptide (e.g., a virus-encoded peptide). In some cases, the TTP is an antibody specific for a cancer-associated antigen, e.g., a cancer-associated antigen present on the surface of a cancer cell. In some cases, the TTP is a scFv or a nanobody. In some cases, the TTP is an antibody specific for a cancer-associated peptide/HLA complex (i.e., an HLA heavy chain and a β2M polypeptide) present on the surface of a cancer cell. In some cases, the TTP is a scTCR specific for a cancer-associated antigen, e.g., a cancer-associated antigen present on the surface of a cancer cell. In some cases, the TTP is a scFv that binds Her2/HLA (a Her2 peptide bound to an HLA complex comprising an HLA heavy chain and a β2M polypeptide). In some cases, the TTP is a scFv that binds CD19/HLA (a CD19 peptide bound to an HLA complex comprising an HLA heavy chain and a β2M polypeptide). In some cases, the peptide epitope is a peptide of a CMV antigen. In some cases, the peptide epitope is a peptide of a CMV pp65 polypeptide. In some cases, the peptide epitope is a peptide of a CMV gB polypeptide. In some cases, the peptide epitope has the amino acid sequence NLVPMVATV (SEQ ID NO:395) and has a length of 9 amino acids.

[0587] In some cases, a TMMP of the present disclosure comprises: a) a first polypeptide comprising, in order from N-terminus to C-terminus: i) a peptide epitope; ii) a first MHC polypeptide; and iii) a TTP; and b) a second polypeptide comprising, in order from N-terminus to C-terminus: i) a second MHC polypeptide; ii) at least one immunomodulatory polypeptide; and iii) an Ig Fc polypeptide. See, e.g., FIG. 1J. In some cases, the HLA heaving chain comprises: a) an amino acid sequence having at least 95% amino acid sequence identity to the HLA-A*0101, HLA-A*0201, HLA-A*0201, HLA-A*1101, HLA-A*2301, HLA-A*2402, HLA-A*2407, HLA-A*3303, or HLA-A*3401 amino acid sequence depicted in FIG. 7A; or b) an amino acid sequence having at least 95% amino acid sequence identity to the HLA-B*0702, HLA-B*0801, HLA-B*1502, HLA-B*3802, HLA-B*4001, HLA-B*4601, or HLA-B*5301 amino acid sequence depicted in FIG. 8A; or c) an amino acid sequence having at least 95% amino acid sequence identity to the HLA-C*0102, HLA-C*0303, HLA-C*0304, HLA-C*0401, HLA-C*0602, HLA-C*0701, HLA-C*0702, HLA-C*0801, or HLA-C*1502 depicted in FIG. 9A.In some cases, the HLA heavy chain polypeptide is an HLA-A*0201 polypeptide. In some cases, the HLA heavy chain polypeptide is an HLA-A24 polypeptide. In some cases, the HLA heavy chain comprises an A236C substitution. In some cases, the HLA heavy chain polypeptide is an HLA-A24 polypeptide with an A236C substitution. In some cases, the Ig Fc polypeptide is a human IgG1 Fc polypeptide. In some cases, the Ig Fc polypeptide is an IgG1 Fc polypeptide comprising L234A and L235A substitutions. In some cases, the first and the second polypeptides are disulfide linked to one another. In some cases, the first and the second polypeptides are linked to one another by 2 disulfide bonds. In some cases, the immunomodulatory polypeptide comprises a wild-type amino acid sequence; in other cases, the immunomodulatory polypeptide is a variant, e.g., as described above. In some cases, the immunomodulatory polypeptide is a 4-1BBL polypeptide, e.g., a variant 4-1BBL polypeptide. In some cases, the immunomodulatory polypeptide is a variant IL-2 polypeptide. In some cases, the immunomodulatory polypeptide is a variant IL-2 polypeptide comprising H16A and F42A substitutions. In some cases, the immunomodulatory polypeptide is a variant IL-2 polypeptide comprising H16T and F42A substitutions. In some cases, a peptide linker is between one or more of: i) the second MHC polypeptide and the Ig Fc polypeptide; ii) the epitope and the first MHC polypeptide; iii) the first MHC polypeptide and the immunomodulatory polypeptide; iv) (where the TMMP comprises two immunomodulatory polypeptides on the first polypeptide chain) between the two immunomodulatory polypeptides; and v) the Ig Fc polypeptide and the TTP. In some cases, the peptide linker comprises the amino acid sequence AAAGG. In some cases, the peptide linker comprises the amino acid sequence (GGGGS)n, where n is an integer from 1 to 10 (e.g., where n is 2, 3, or 4). In some cases, the peptide epitope present in the TMMP is a cancer-associated peptide. In some cases, the peptide epitope present in a TMMP of the present disclosure is an infectious disease-associated peptide (e.g., a virus-encoded peptide). In some cases, the TTP is an antibody specific for a cancer-associated antigen, e.g., a cancer-associated antigen present on the surface of a cancer cell. In some cases, the TTP is a scFv or a nanobody. In some cases, the TTP is an antibody specific for a cancer-associated peptide/HLA complex (i.e., an HLA heavy chain and a β2M polypeptide) present on the surface of a cancer cell. In some cases, the TTP is a scTCR specific for a cancer-associated antigen, e.g., a cancer-associated antigen present on the surface of a cancer cell. In some cases, the TTP is a scFv that binds Her2/HLA (a Her2 peptide bound to an HLA complex comprising an HLA heavy chain and a β2M polypeptide). In some cases, the TTP is a scFv that binds CD19/HLA (a CD19 peptide bound to an HLA complex comprising an HLA heavy chain and a β2M polypeptide). In some cases, the peptide epitope is a peptide of a CMV antigen. In some cases, the peptide epitope is a peptide of a CMV pp65 polypeptide. In some cases, the peptide epitope is a peptide of a CMV gB polypeptide. In some cases, the peptide epitope has the amino acid sequence NLVPMVATV (SEQ ID NO:395) and has a length of 9 amino acids.

[0588] As one non-limiting example, a TMMP of the present disclosure can comprise: a) a first polypeptide comprising: i) a peptide epitope; ii) a β2M polypeptide; and iii) at least one immunomodulatory polypeptide; and b) a second polypeptide, designated 3796 as set forth in FIG. 13A, where the TTP is an anti-Her2 scFv. For example, the first polypeptide can comprise the amino acid sequence depicted in FIG. 13F, where the first polypeptide comprises two variant IL-2 polypeptides as the at least one immunomodulatory polypeptide. In some cases, the peptide epitope is a Her2 peptide. In some cases, the peptide epitope is a CMV peptide. In some cases, the peptide epitope is a peptide of a CMV pp65 polypeptide. In some cases, the peptide epitope is a peptide of a CMV gB polypeptide. In some cases, the epitope has the amino acid sequence NLVPMVATV (SEQ ID NO:395) and has a length of 9 amino acids.

[0589] As another non-limiting example, a TMMP of the present disclosure can comprise: a) a first polypeptide comprising: i) a peptide epitope; and ii) a β2M polypeptide; and b) a second polypeptide, designated 3797 as set forth in FIG. 13B, where the TTP is an anti-Her2 scFv. For example, the first polypeptide can comprise the amino acid sequence depicted in FIG. 13E. In some cases, the epitope is a Her2 peptide. In some cases, the peptide epitope is a peptide of a CMV antigen. In some cases, the peptide epitope is a peptide of a CMV pp65 polypeptide. In some cases, the peptide epitope is a peptide of a CMV gB polypeptide. In some cases, the peptide epitope has the amino acid sequence NLVPMVATV (SEQ ID NO:395) and has a length of 9 amino acids.

[0590] As another non-limiting example, a TMMP of the present disclosure can comprise: a) a first polypeptide comprising: i) a peptide epitope; ii) a β2M polypeptide; and iii) at least one immunomodulatory polypeptide; and b) a second polypeptide, designated 3798 as set forth in FIG. 13C, where the TTP is an anti-CD19 scFv. For example, the first polypeptide can comprise the amino acid sequence depicted in FIG. 13F, where the first polypeptide comprises two variant IL-2 polypeptides as the at least one immunomodulatory polypeptide. In some cases, the peptide epitope is a CD19 peptide. In some cases, the peptide epitope is a peptide of a CMV antigen. In some cases, the peptide epitope is a peptide of a CMV pp65 polypeptide. In some cases, the peptide epitope is a peptide of a CMV gB polypeptide. In some cases, the epitope has the amino acid sequence NLVPMVATV (SEQ ID NO:395) and has a length of 9 amino acids.

[0591] As another non-limiting example, a TMMP of the present disclosure can comprise: a) a first polypeptide comprising: i) a peptide epitope; and ii) a β2M polypeptide; and b) a second polypeptide, designated 3799 as set forth in FIG. 13D, where the TTP is an anti-CD19 scFv. For example, the first polypeptide can comprise the amino acid sequence depicted in FIG. 13E. In some cases, the peptide epitope is a CD19 peptide. In some cases, the peptide epitope is a peptide of a CMV antigen. In some cases, the peptide epitope is a peptide of a CMV pp65 polypeptide. In some cases, the peptide epitope is a peptide of a CMV gB polypeptide. In some cases, the epitope has the amino acid sequence NLVPMVATV (SEQ ID NO:395) and has a length of 9 amino acids.

[0592] As another non-limiting example, a TMMP of the present disclosure can comprise: a) a first polypeptide, designated 839 as set forth in FIG. 14A; and b) a second polypeptide, designated 3796 as set forth in FIG. 13A.

[0593] As another non-limiting example, a TMMP of the present disclosure can comprise: a) a first polypeptide, designated 1717 as set forth in FIG. 14B; and b) a second polypeptide, designated 3796 as set forth in FIG. 13A.

[0594] As another non-limiting example, a TMMP of the present disclosure can comprise: a) a first polypeptide, designated 2407 as set forth in FIG. 14C; and b) a second polypeptide, designated 3796 as set forth in FIG. 13A.

[0595] As another non-limiting example, a TMMP of the present disclosure can comprise: a) a first polypeptide, designated 839 as set forth in FIG. 14A; and b) a second polypeptide, designated 3797 as set forth in FIG. 13B.

[0596] As another non-limiting example, a TMMP of the present disclosure can comprise: a) a first polypeptide, designated 1717 as set forth in FIG. 14B; and b) a second polypeptide, designated 3797 as set forth in FIG. 13B.

[0597] As another non-limiting example, a TMMP of the present disclosure can comprise: a) a first polypeptide, designated 2407 as set forth in FIG. 14C; and b) a second polypeptide, designated 3797 as set forth in FIG. 13B.

[0598] As another non-limiting example, a TMMP of the present disclosure can comprise: a) a first polypeptide, designated 839 as set forth in FIG. 14A; and b) a second polypeptide, designated 3798 as set forth in FIG. 13C.

[0599] As another non-limiting example, a TMMP of the present disclosure can comprise: a) a first polypeptide, designated 1717 as set forth in FIG. 14B; and b) a second polypeptide, designated 3798 as set forth in FIG. 13C.

[0600] As another non-limiting example, a TMMP of the present disclosure can comprise: a) a first polypeptide, designated 2407 as set forth in FIG. 14C; and b) a second polypeptide, designated 3798 as set forth in FIG. 13C.

[0601] As another non-limiting example, a TMMP of the present disclosure can comprise: a) a first polypeptide, designated 839 as set forth in FIG. 14A; and b) a second polypeptide, designated 3799 as set forth in FIG. 13D.

[0602] As another non-limiting example, a TMMP of the present disclosure can comprise: a) a first polypeptide, designated 1717 as set forth in FIG. 14B; and b) a second polypeptide, designated 3799 as set forth in FIG. 13D.

[0603] As another non-limiting example, a TMMP of the present disclosure can comprise: a) a first polypeptide, designated 2407 as set forth in FIG. 14C; and b) a second polypeptide, designated 3799 as set forth in FIG. 13D.

[0604] As another non-limiting example, a TMMP of the present disclosure can comprise: a) a first polypeptide, designated 1717 as set forth in FIG. 14B; and b) a second polypeptide, designated 4010 as set forth in FIG. 15A.

[0605] As another non-limiting example, a TMMP of the present disclosure can comprise: a) a first polypeptide, designated 1717 as set forth in FIG. 14B; and b) a second polypeptide, designated 4012 as set forth in FIG. 15B.

### Methods of Generating a Multimeric T-Cell Modulatory Polypeptide

[0606] The present disclosulre provides a method of obtaining a TMMP comprising one or more variant immunomodulatory polypeptides that exhibit lower affinity for a cognate co-immunomodulatory polypeptide compared to the affinity of the corresponding parental wild-type immunomodulatory polypeptide for the co-immunomodulatory polypeptide, the method comprising: A) generating a library of TMMPs comprising a plurality of members, wherein each member comprises: a) a first polypeptide comprising: i) an epitope; and ii) a first major MHC polypeptide; and b) a second polypeptide comprising: i) a second MHC polypeptide; ii) an Ig Fc polypeptide or a non-Ig scaffold; and iii) a TTP, wherein each member comprises a different variant immunomodulatory polypeptide on the first polypeptide, the second polypeptide, or both the first and the second polypeptide; B) determining the affinity of each member of the library for a cognate co-immunomodulatory polypeptide; and C) selecting a member that exhibits reduced affinity for the cognate co-immunomodulatory polypeptide. In some cases, the affinity is determined by bio-layer interferometry (BLI) using purified TMMP library members and the cognate co-immunomodulatory polypeptide. BLI methods are well known to those skilled in the art. A BLI assay is described above. See, e.g., Lad et al. (2015) J. Biomol. Screen. 20(4): 498-507; and Shah and Duncan (2014) J. Vis. Exp. 18:e51383.

[0607] The present disclosure provides a method of obtaining a TMMP that exhibits selective binding to a T-cell, the method comprising: A) generating a library of TMMPs comprising a plurality of members, wherein each member comprises: a) a first polypeptide comprising: i) an epitope; and ii) a first MHC polypeptide; and b) a second polypeptide comprising: i) a second MHC polypeptide; ii) an Ig Fc polypeptide or a non-Ig scaffold; and iii) a TTP, wherein each member comprises a different variant immunomodulatory polypeptide on the first polypeptide, the second polypeptide, or both the first and the second polypeptide, wherein the variant immunomodulatory polypeptide differs in amino acid sequence by from 1 amino acid to 10 amino acids from a parental wild-type immunomodulatory polypeptide; B) contacting a TMMP library member with a target T-cell expressing on its surface: i) a cognate co-immunomodulatory polypeptide that binds the parental wild-type immunomodulatory polypeptide; and ii) a T-cell receptor that binds to the epitope, wherein the TMMP library member comprises an epitope tag, such that the TMMP library member binds to the target T-cell; C) contacting the TMMP library member bound to the target T-cell with a fluorescently labeled binding agent that binds to the epitope tag, generating a TMMP library member/target T-cell/binding agent complex; D) measuring the mean fluorescence intensity (MFI) of the TMMP library member/target T-cell/binding agent complex using flow cytometry, wherein the MFI measured over a range of concentrations of the TMMP library member provides a measure of the affinity and apparent avidity; and E) selecting a TMMP library member that selectively binds the target T cell, compared to binding of the TMMP library member to a control T cell that comprises: i) the cognate co-immunomodulatory polypeptide that binds the parental wild-type immunomodulatory polypeptide; and ii) a T-cell receptor that binds to an epitope other than the epitope present in the TMMP library member. In some cases, a TMMP library member that is identified as selectively binds to a target T cell is isolated from the library.

[0608] In some cases, a parental wild-type immunomodulatory polypeptide and cognate immunomodulatory polypeptide pairs are selected from:

[0609] IL-2 and IL-2 receptor;

[0610] 4-1BBL and 4-1BB;

[0611] PD-L1 and PD-1;

[0612] CD70 and CD27;

[0613] TGFβ and TGFβ receptor;

[0614] CD80 and CD28;

[0615] CD86 and CD28;

[0616] OX40L and OX40;

[0617] FasL and Fas;

[0618] ICOS-L and ICOS;

[0619] ICAM and LFA-1;

[0620] JAG1 and Notch;

[0621] JAG1 and CD46;

[0622] CD80 and CTLA4; and

[0623] CD86 and CTLA4.

[0624] The present disclosure provides a method of obtaining a TMMP comprising one or more variant immunomodulatory polypeptides that exhibit reduced affinity for a cognate co-immunomodulatory polypeptide compared to the affinity of the corresponding parental wild-type immunomodulatory polypeptide for the co-immunomodulatory polypeptide, the method comprising selecting, from a library of TMMPs comprising a plurality of members, a member that exhibits reduced affinity for the cognate co-immunomodulatory polypeptide, wherein the plurality of member comprises: a) a first polypeptide comprising: i) an epitope; and ii) a first MHC polypeptide; and b) a second polypeptide comprising: i) a second MHC polypeptide; ii) an Ig Fc polypeptide or a non-Ig scaffold; and iii) a TTP, wherein the members of the library comprise a plurality of variant immunomodulatory polypeptide present in the first polypeptide, the second polypeptide, or both the first and the second polypeptide. In some cases, the selecting step comprises determining the affinity, using bio-layer interferometry, of binding between TMMP library members and the cognate co-immunomodulatory polypeptide. In some cases, the TMMP is as described above.

[0625] In some cases, the method further comprises: a) contacting the selected TMMP library member with a target T-cell expressing on its surface: i) a cognate co-immunomodulatory polypeptide that binds the parental wild-type immunomodulatory polypeptide; and ii) a T-cell receptor that binds to the epitope, wherein the TMMP library member comprises an epitope tag, such that the TMMP library member binds to the target T-cell; b) contacting the selected TMMP library member bound to the target T-cell with a fluorescently labeled binding agent that binds to the epitope tag, generating a selected TMMP library member/target T-cell/binding agent complex; and c) measuring the mean fluorescence intensity (MFI) of the selected TMMP library member/target T-cell/binding agent complex using flow cytometry, wherein the MFI measured over a range of concentrations of the selected TMMP library member provides a measure of the affinity and apparent avidity. A selected TMMP library member that selectively binds the target T cell, compared to binding of the TMMP library member to a control T cell that comprises: i) the cognate co-immunomodulatory polypeptide that binds the parental wild-type immunomodulatory polypeptide; and ii) a T-cell receptor that binds to an epitope other than the epitope present in the TMMP library member, is identified as selectively binding to the target T cell. In some cases, the binding agent is an antibody specific for the epitope tag. In some cases, the variant immunomodulatory polypeptide comprises from 1 to 20 amino acid substitutions (e.g., 1, 2, 3, 4, 5, 6, 7, 8, 9, 10, 11, 12, 13, 14, 15, 16, 17, 18, 19, or 20 amino acid substitutions) compared to the corresponding parental wild-type immunomodulatory polypeptide. In some cases, the TMMP comprises two variant immunomodulatory polypeptides. In some cases, the two variant immunomodulatory polypeptides comprise the same amino acid sequence. In some cases, the first polypeptide comprises one of the two variant immunomodulatory polypeptides and wherein the second polypeptide comprises the second of the two variant immunomodulatory polypeptides. In some cases, the two variant immunomodulatory polypeptides are on the same polypeptide chain of the TMMP. In some cases, the two variant immunomodulatory polypeptides are on the first polypeptide of the TMMP. In some cases, the two variant immunomodulatory polypeptides are on the second polypeptide of the TMMP.

[0626] In some cases, the method further comprises isolating the selected TMMP library member from the library. In some cases, the method further comprises providing a nucleic acid comprising a nucleotide sequence encoding the selected TMMP library member. In some cases, the nucleic acid is present in a recombinant expression vector. In some cases, the nucleotide sequence is operably linked to a transcriptional control element that is functional in a eukaryotic cell. In some cases, the method further comprises introducing the nucleic acid into a eukaryotic host cell, and culturing the cell in a liquid medium to synthesize the encoded selected TMMP library member in the cell. In some cases, the method further comprises isolating the synthesized selected TMMP library member from the cell or from liquid culture medium comprising the cell. In some cases, the selected TMMP library member comprises an Ig Fc polypeptide. In some cases, the method further comprises conjugating a drug to the Ig Fc polypeptide. In some cases, the drug is a cytotoxic agent is selected from maytansinoid, benzodiazepine, taxoid, CC-1065, duocarmycin, a duocarmycin analog, calicheamicin, dolastatin, a dolastatin analog, auristatin, tomaymycin, and leptomycin, or a pro-drug of any one of the foregoing. In some cases, the drug is a retinoid. In some cases, the parental wild-type immunomodulatory polypeptide and the cognate immunomodulatory polypeptides are selected from: IL-2 and IL-2 receptor; 4-1BBL and 4-1BB; PD-L1 and PD-1; CD70 and CD27; TGFβ and TGFβ receptor; CD80 and CD28; CD86 and CD28; OX40L and OX40; FasL and Fas; ICOS-L and ICOS; ICAM and LFA-1; JAG1 and Notch; JAG1 and CD46; CD80 and CTLA4; and CD86 and CTLA4.

[0627] The present disclosure provides a method of obtaining a TMMP comprising one or more variant immunomodulatory polypeptides that exhibit reduced affinity for a cognate co-immunomodulatory polypeptide compared to the affinity of the corresponding parental wild-type immunomodulatory polypeptide for the co-immunomodulatory polypeptide, the method comprising: A) providing a library of TMMPs comprising a plurality of members, wherein the plurality of member comprises: a) a first polypeptide comprising: i) an epitope; and ii) a first MHC polypeptide; and b) a second polypeptide comprising: i) a second MHC polypeptide; and ii) optionally an Ig Fc polypeptide or a non-Ig scaffold, wherein the members of the library comprise a plurality of variant immunomodulatory polypeptide present in the first polypeptide, the second polypeptide, or both the first and the second polypeptide; and B) selecting from the library a member that exhibits reduced affinity for the cognate co-immunomodulatory polypeptide. In some cases, the selecting step comprises determining the affinity, using bio-layer interferometry, of binding between TMMP library members and the cognate co-immunomodulatory polypeptide. In some cases, the TMMP is as described above.

[0628] In some cases, the method further comprises: a) contacting the selected TMMP library member with a target T-cell expressing on its surface: i) a cognate co-immunomodulatory polypeptide that binds the parental wild-type immunomodulatory polypeptide; and ii) a T-cell receptor that binds to the epitope, wherein the TMMP library member comprises an epitope tag, such that the TMMP library member binds to the target T-cell; b) contacting the selected TMMP library member bound to the target T-cell with a fluorescently labeled binding agent that binds to the epitope tag, generating a selected TMMP library member/target T-cell/binding agent complex; and c) measuring the mean fluorescence intensity (MFI) of the selected TMMP library member/target T-cell/binding agent complex using flow cytometry, wherein the MFI measured over a range of concentrations of the selected TMMP library member provides a measure of the affinity and apparent avidity. A selected TMMP library member that selectively binds the target T cell, compared to binding of the TMMP library member to a control T cell that comprises: i) the cognate co-immunomodulatory polypeptide that binds the parental wild-type immunomodulatory polypeptide; and ii) a T-cell receptor that binds to an epitope other than the epitope present in the TMMP library member, is identified as selectively binding to the target T cell. In some cases, the binding agent is an antibody specific for the epitope tag. In some cases, the variant immunomodulatory polypeptide comprises from 1 to 20 amino acid substitutions (e.g., 1, 2, 3, 4, 5, 6, 7, 8, 9, 10, 11, 12, 13, 14, 15, 16, 17, 18, 19, or 20 amino acid substitutions) compared to the corresponding parental wild-type immunomodulatory polypeptide. In some cases, the TMMP comprises two variant immunomodulatory polypeptides. In some cases, the two variant immunomodulatory polypeptides comprise the same amino acid sequence. In some cases, the first polypeptide comprises one of the two variant immunomodulatory polypeptides and wherein the second polypeptide comprises the second of the two variant immunomodulatory polypeptides. In some cases, the two variant immunomodulatory polypeptides are on the same polypeptide chain of the TMMP. In some cases, the two variant immunomodulatory polypeptides are on the first polypeptide of the TMMP. In some cases, the two variant immunomodulatory polypeptides are on the second polypeptide of the TMMP.

[0629] In some cases, the method further comprises isolating the selected TMMP library member from the library. In some cases, the method further comprises providing a nucleic acid comprising a nucleotide sequence encoding the selected TMMP library member. In some cases, the nucleic acid is present in a recombinant expression vector. In some cases, the nucleotide sequence is operably linked to a transcriptional control element that is functional in a eukaryotic cell. In some cases, the method further comprises introducing the nucleic acid into a eukaryotic host cell, and culturing the cell in a liquid medium to synthesize the encoded selected TMMP library member in the cell. In some cases, the method further comprises isolating the synthesized selected TMMP library member from the cell or from liquid culture medium comprising the cell. In some cases, the selected TMMP library member comprises an Ig Fc polypeptide. In some cases, the method further comprises conjugating a drug to the Ig Fc polypeptide. In some cases, the drug is a cytotoxic agent is selected from maytansinoid, benzodiazepine, taxoid, CC-1065, duocarmycin, a duocarmycin analog, calicheamicin, dolastatin, a dolastatin analog, auristatin, tomaymycin, and leptomycin, or a pro-drug of any one of the foregoing. In some cases, the drug is a retinoid. In some cases, the parental wild-type immunomodulatory polypeptide and the cognate immunomodulatory polypeptides are selected from IL-2 and IL-2 receptor; 4-1BBL and 4-1BB; PD-L1 and PD-1; TGFβ and TGFβ receptor; CD80 and CD28; CD86 and CD28; OX40L and OX40; FasL and Fas; ICOS-L and ICOS; CD70 and CD27; ICAM and LFA-1; JAG1 and Notch; JAG1 and CD46; CD80 and CTLA4; and CD86 and CTLA4.

### Nucleic Acids

[0630] The present disclosure provides a nucleic acid comprising a nucleotide sequence encoding a TMMP of the present disclosure. The present disclosure provides a nucleic acid comprising a nucleotide sequence encoding a TMMP of the present disclosure.

[0631] The present disclosure provides nucleic acids comprising nucleotide sequences encoding a TMMP of the present disclosure. In some cases, the individual polypeptide chains of a TMMP of the present disclosure are encoded in separate nucleic acids. In some cases, all polypeptide chains of a TMMP of the present disclosure are encoded in a single nucleic acid. In some cases, a first nucleic acid comprises a nucleotide sequence encoding a first polypeptide of a TMMP of the present disclosure; and a second nucleic acid comprises a nucleotide sequence encoding a second polypeptide of a TMMP of the present disclosure. In some cases, single nucleic acid comprises a nucleotide sequence encoding a first polypeptide of a TMMP of the present disclosure and a second polypeptide of a TMMP of the present disclosure.

### Separate Nucleic Acids Encoding Individual Polypeptide Chains of a Multimeric Polypeptide

[0632] The present disclosure provides nucleic acids comprising nucleotide sequences encoding a TMMP of the present disclosure. As noted above, in some cases, the individual polypeptide chains of a TMMP of the present disclosure are encoded in separate nucleic acids. In some cases, nucleotide sequences encoding the separate polypeptide chains of a TMMP of the present disclosure are operably linked to transcriptional control elements, e.g., promoters, such as promoters that are functional in a eukaryotic cell, where the promoter can be a constitutive promoter or an inducible promoter.

[0633] For example, the present disclosure provides a first nucleic acid and a second nucleic acid, where the first nucleic acid comprises a nucleotide sequence encoding a first polypeptide of a TMMP of the present disclosure, where the first polypeptide comprises, in order from N-terminus to C-terminus: a) a peptide epitope; b) a first MHC polypeptide; and c) an immunomodulatory polypeptide (e.g., a reduced-affinity variant, as described above); and where the second nucleic acid comprises a nucleotide sequence encoding a second polypeptide of a TMMP of the present disclosure, where the second polypeptide comprises, in order from N-terminus to C-terminus: a) a second MHC polypeptide; b) an Ig Fc polypeptide; and c) a TTP. Suitable peptide epitopes, MHC polypeptides, immunomodulatory polypeptides, Ig Fc polypeptides, and TTPs are described above. In some cases, the nucleotide sequences encoding the first and the second polypeptides are operably linked to transcriptional control elements. In some cases, the transcriptional control element is a promoter that is functional in a eukaryotic cell. In some cases, the nucleic acids are present in separate expression vectors.

[0634] The present disclosure provides a first nucleic acid and a second nucleic acid, where the first nucleic acid comprises a nucleotide sequence encoding a first polypeptide of a TMMP of the present disclosure, where the first polypeptide comprises, in order from N-terminus to C-terminus: a) a peptide epitope; and b) a first MHC polypeptide; and where the second nucleic acid comprises a nucleotide sequence encoding a second polypeptide of a TMMP of the present disclosure, where the second polypeptide comprises, in order from N-terminus to C-terminus: a) an immunomodulatory polypeptide (e.g., a reduced-affinity variant as described above); b) a second MHC polypeptide; c) an Ig Fc polypeptide; and d) a TTP. Suitable peptide epitopes, MHC polypeptides, immunomodulatory polypeptides, and Ig Fc polypeptides, are described above. In some cases, the nucleotide sequences encoding the first and the second polypeptides are operably linked to transcriptional control elements. In some cases, the transcriptional control element is a promoter that is functional in a eukaryotic cell. In some cases, the nucleic acids are present in separate expression vectors.

### Nucleic Acid Encoding Two or More Polypeptides Present in a Multimeric Polypeptide

[0635] The present disclosure provides a nucleic acid comprising nucleotide sequences encoding at least the first polypeptide and the second polypeptide of a TMMP of the present disclosure. In some cases, where a TMMP of the present disclosure includes a first, second, and third polypeptide, the nucleic acid includes a nucleotide sequence encoding the first, second, and third polypeptides. In some cases, the nucleotide sequences encoding the first polypeptide and the second polypeptide of a TMMP of the present disclosure includes a proteolytically cleavable linker interposed between the nucleotide sequence encoding the first polypeptide and the nucleotide sequence encoding the second polypeptide. In some cases, the nucleotide sequences encoding the first polypeptide and the second polypeptide of a TMMP of the present disclosure includes an internal ribosome entry site (IRES) interposed between the nucleotide sequence encoding the first polypeptide and the nucleotide sequence encoding the second polypeptide. In some cases, the nucleotide sequences encoding the first polypeptide and the second polypeptide of a TMMP of the present disclosure includes a ribosome skipping signal (or cis-acting hydrolase element, CHYSEL) interposed between the nucleotide sequence encoding the first polypeptide and the nucleotide sequence encoding the second polypeptide. Examples of nucleic acids are described below, where a proteolytically cleavable linker is provided between nucleotide sequences encoding the first polypeptide and the second polypeptide of a TMMP of the present disclosure; in any of these embodiments, an IRES or a ribosome skipping signal can be used in place of the nucleotide sequence encoding the proteolytically cleavable linker.

[0636] In some cases, a first nucleic acid (e.g., a recombinant expression vector, an mRNA, a viral RNA, etc.) comprises a nucleotide sequence encoding a first polypeptide chain of a TMMP of the present disclosure; and a second nucleic acid (e.g., a recombinant expression vector, an mRNA, a viral RNA, etc.) comprises a nucleotide sequence encoding a second polypeptide chain of a TMMP of the present disclosure. In some cases, the nucleotide sequence encoding the first polypeptide, and the second nucleotide sequence encoding the second polypeptide, are each operably linked to transcriptional control elements, e.g., promoters, such as promoters that are functional in a eukaryotic cell, where the promoter can be a constitutive promoter or an inducible promoter.

[0637] The present disclosure provides a nucleic acid comprising a nucleotide sequence encoding a recombinant polypeptide, where the recombinant polypeptide comprises, in order from N-terminus to C-terminus: a) a peptide epitope; b) a first MHC polypeptide; c) an immunomodulatory polypeptide (e.g., a reduced-affinity variant as described above); d) a proteolytically cleavable linker; e) a second MHC polypeptide; f) an Ig Fc polypeptide; and g) a TTP. The present disclosure provides a nucleic acid comprising a nucleotide sequence encoding a recombinant polypeptide, where the recombinant polypeptide comprises, in order from N-terminus to C-terminus: a) a first leader peptide; b) the epitope; c) the first MHC polypeptide; d) the immunomodulatory polypeptide (e.g., a reduced-affinity variant as described above); e) the proteolytically cleavable linker; f) a second leader peptide; g) the second MHC polypeptide; h) the Ig Fc polypeptide; and i) the TTP. The present disclosure provides a nucleic acid comprising a nucleotide sequence encoding a recombinant polypeptide, where the recombinant polypeptide comprises, in order from N-terminus to C-terminus: a) an epitope; b) a first MHC polypeptide; c) a proteolytically cleavable linker; d) an immunomodulatory polypeptide (e.g., a reduced-affinity variant as described above); e) a second MHC polypeptide; f) an Ig Fc polypeptide; and g) a TTP. In some cases, the first leader peptide and the second leader peptide are a β2-M leader peptide. In some cases, the nucleotide sequence is operably linked to a transcriptional control element. In some cases, the transcriptional control element is a promoter that is functional in a eukaryotic cell.

[0638] Suitable MHC polypeptides are described above. In some cases, the first MHC polypeptide is a β2-microglobulin polypeptide; and wherein the second MHC polypeptide is an MHC class I heavy chain polypeptide. In some cases, the β2-microglobulin polypeptide comprises an amino acid sequence having at least 85% amino acid sequence identity to a β2M amino acid sequence depicted in FIG. 4. In some cases, the MHC class I heavy chain polypeptide is an HLA-A, HLA-B, HLA-C, HLA-E, HLA-F, HLA-G, HLA-K, or HLA-L heavy chain.

[0639] Suitable Fc polypeptides are described above. In some cases, the Ig Fc polypeptide is an IgG1 Fc polypeptide, an IgG2 Fc polypeptide, an IgG3 Fc polypeptide, an IgG4 Fc polypeptide, an IgA Fc polypeptide, or an IgM Fc polypeptide. In some cases, the Ig Fc polypeptide comprises an amino acid sequence having at least 85% amino acid sequence identity to an amino acid sequence depicted in FIGS. 3A-3G.

[0640] Suitable immunomodulatory polypeptides are described above.

[0641] Suitable proteolytically cleavable linkers are described above. In some cases, the proteolytically cleavable linker comprises an amino acid sequence selected from: a) LEVLFQGP (SEQ ID NO:556); b) ENLYTQS (SEQ ID NO:557); c) DDDDK (SEQ ID NO:558); d) LVPR (SEQ ID NO:559); and e) GSGATNFSLLKQAGDVEENPGP (SEQ ID NO:560).

[0642] In some cases, a linker between the epitope and the first MHC polypeptide comprises a first Cys residue, and the second MHC polypeptide comprises an amino acid substitution to provide a second Cys residue, such that the first and the second Cys residues provide for a disulfide linkage between the linker and the second MHC polypeptide. In some cases, first MHC polypeptide comprises an amino acid substitution to provide a first Cys residue, and the second MHC polypeptide comprises an amino acid substitution to provide a second Cys residue, such that the first Cys residue and the second Cys residue provide for a disulfide linkage between the first MHC polypeptide and the second MHC polypeptide.

### Recombinant Expression Vectors

[0643] The present disclosure provides recombinant expression vectors comprising nucleic acids of the present disclosure. In some cases, the recombinant expression vector is a non-viral vector. In some cases, the recombinant expression vector is a viral construct, e.g., a recombinant adeno-associated virus construct (see, e.g., U.S. Pat. No. 7,078,387), a recombinant adenoviral construct, a recombinant lentiviral construct, a recombinant retroviral construct, a non-integrating viral vector, etc.

[0644] Suitable expression vectors include, but are not limited to, viral vectors (e.g. viral vectors based on vaccinia virus; poliovirus; adenovirus (see, e.g., Li et al., Invest Opthalmol Vis Sci 35:2543 2549, 1994; Borras et al., Gene Ther 6:515 524, 1999; Li and Davidson, PNAS 92:7700 7704, 1995; Sakamoto et al., H Gene Ther 5:1088 1097, 1999; WO 94/12649, WO 93/03769; WO 93/19191; WO 94/28938; WO 95/11984 and WO 95/00655); adeno-associated virus (see, e.g., Ali et al., Hum Gene Ther 9:81 86, 1998, Flannery et al., PNAS 94:6916 6921, 1997; Bennett et al., Invest Opthalmol Vis Sci 38:2857 2863, 1997; Jomary et al., Gene Ther 4:683 690, 1997, Rolling et al., Hum Gene Ther 10:641 648, 1999; Ali et al., Hum Mol Genet 5:591 594, 1996; Srivastava in WO 93/09239, Samulski et al., J. Vir. (1989) 63:3822-3828; Mendelson et al., Virol. (1988) 166:154-165; and Flotte et al., PNAS (1993) 90:10613-10617); SV40; herpes simplex virus; human immunodeficiency virus (see, e.g., Miyoshi et al., PNAS 94:10319 23, 1997; Takahashi et al., J Virol 73:7812 7816, 1999); a retroviral vector (e.g., Murine Leukemia Virus, spleen necrosis virus, and vectors derived from retroviruses such as Rous Sarcoma Virus, Harvey Sarcoma Virus, avian leukosis virus, a lentivirus, human immunodeficiency virus, myeloproliferative sarcoma virus, and mammary tumor virus); and the like.

[0645] Numerous suitable expression vectors are known to those of skill in the art, and many are commercially available. The following vectors are provided by way of example; for eukaryotic host cells: pXT1, pSGS (Stratagene), pSVK3, pBPV, pMSG, and pSVLSV40 (Pharmacia). However, any other vector may be used so long as it is compatible with the host cell.

[0646] Depending on the host/vector system utilized, any of a number of suitable transcription and translation control elements, including constitutive and inducible promoters, transcription enhancer elements, transcription terminators, etc. may be used in the expression vector (see e.g., Bitter et al. (1987) Methods in Enzymology, 153:516-544).

[0647] In some cases, a nucleotide sequence encoding a DNA-targeting RNA and/or a site-directed modifying polypeptide is operably linked to a control element, e.g., a transcriptional control element, such as a promoter. The transcriptional control element may be functional in either a eukaryotic cell, e.g., a mammalian cell; or a prokaryotic cell (e.g., bacterial or archaeal cell). In some cases, a nucleotide sequence encoding a DNA-targeting RNA and/or a site-directed modifying polypeptide is operably linked to multiple control elements that allow expression of the nucleotide sequence encoding a DNA-targeting RNA and/or a site-directed modifying polypeptide in both prokaryotic and eukaryotic cells.

[0648] Non-limiting examples of suitable eukaryotic promoters (promoters functional in a eukaryotic cell) include those from cytomegalovirus (CMV) immediate early, herpes simplex virus (HSV) thymidine kinase, early and late SV40, long terminal repeats (LTRs) from retrovirus, and mouse metallothionein-I. Selection of the appropriate vector and promoter is well within the level of ordinary skill in the art. The expression vector may also contain a ribosome binding site for translation initiation and a transcription terminator. The expression vector may also include appropriate sequences for amplifying expression.

### Genetically Modified Host Cells

[0649] The present disclosure provides a genetically modified host cell, where the host cell is genetically modified with a nucleic acid of the present disclosure.

[0650] Suitable host cells include eukaryotic cells, such as yeast cells, insect cells, and mammalian cells. In some cases, the host cell is a cell of a mammalian cell line. Suitable mammalian cell lines include human cell lines, non-human primate cell lines, rodent (e.g., mouse, rat) cell lines, and the like. Suitable mammalian cell lines include, but are not limited to, HeLa cells (e.g., American Type Culture Collection (ATCC) No. CCL-2), CHO cells (e.g., ATCC Nos. CRL9618, CCL61, CRL9096), 293 cells (e.g., ATCC No. CRL-1573), Vero cells, NIH 3T3 cells (e.g., ATCC No. CRL-1658), Huh-7 cells, BHK cells (e.g., ATCC No. CCL10), PC12 cells (ATCC No. CRL1721), COS cells, COS-7 cells (ATCC No. CRL1651), RAT1 cells, mouse L cells (ATCC No. CCLI.3), human embryonic kidney (HEK) cells (ATCC No. CRL1573), HLHepG2 cells, and the like.

[0651] In some cases, the host cell is a mammalian cell that has been genetically modified such that it does not synthesize endogenous MHC 02-M.

[0652] In some cases, the host cell is a mammalian cell that has been genetically modified such that it does not synthesize endogenous MHC Class I heavy chain. In some cases, the host cell is a mammalian cell that has been genetically modified such that it does not synthesize endogenous MHC 02-M and such that it does not synthesize endogenous MHC Class I heavy chain.

### Compositions

[0653] The present disclosure provides compositions, including pharmaceutical compositions, comprising a TMMP (synTac) of the present disclosure. The present disclosure provides compositions, including pharmaceutical compositions, comprising a TMMP of the present disclosure. The present disclosure provides compositions, including pharmaceutical compositions, comprising a nucleic acid or a recombinant expression vector of the present disclosure.

### Compositions Comprising a Multimeric Polypeptide

[0654] A composition of the present disclosure can comprise, in addition to a TMMP of the present disclosure, one or more of: a salt, e.g., NaCl, MgCl₂, KCl, MgSO₄, etc.; a buffering agent, e.g., a Tris buffer, N-(2-Hydroxyethyl)piperazine-N′-(2-ethanesulfonic acid) (HEPES), 2-(N-Morpholino)ethanesulfonic acid (MES), 2-(N-Morpholino)ethanesulfonic acid sodium salt (MES), 3-(N-Morpholino)propanesulfonic acid (MOPS), N-tris[Hydroxymethyl]methyl-3-aminopropanesulfonic acid (TAPS), etc.; a solubilizing agent; a detergent, e.g., a non-ionic detergent such as Tween-20, etc.; a protease inhibitor; glycerol; and the like.

[0655] The composition may comprise a pharmaceutically acceptable excipient, a variety of which are known in the art and need not be discussed in detail herein. Pharmaceutically acceptable excipients have been amply described in a variety of publications, including, for example, “Remington: The Science and Practice of Pharmacy”, 19^{th} Ed. (1995), or latest edition, Mack Publishing Co; A. Gennaro (2000) “Remington: The Science and Practice of Pharmacy”, 20th edition, Lippincott, Williams, & Wilkins; Pharmaceutical Dosage Forms and Drug Delivery Systems (1999) H. C. Ansel et al., eds 7^{th} ed., Lippincott, Williams, & Wilkins; and Handbook of Pharmaceutical Excipients (2000) A. H. Kibbe et al., eds., 3^{rd} ed. Amer. Pharmaceutical Assoc.

[0656] A pharmaceutical composition can comprise a TMMP of the present disclosure, and a pharmaceutically acceptable excipient. In some cases, a subject pharmaceutical composition will be suitable for administration to a subject, e.g., will be sterile. For example, in some cases, a subject pharmaceutical composition will be suitable for administration to a human subject, e.g., where the composition is sterile and is free of detectable pyrogens and/or other toxins.

[0657] The protein compositions may comprise other components, such as pharmaceutical grades of mannitol, lactose, starch, magnesium stearate, sodium saccharin, talcum, cellulose, glucose, sucrose, magnesium, carbonate, and the like. The compositions may contain pharmaceutically acceptable auxiliary substances as required to approximate physiological conditions such as pH adjusting and buffering agents, toxicity adjusting agents and the like, for example, sodium acetate, sodium chloride, potassium chloride, calcium chloride, sodium lactate, hydrochloride, sulfate salts, solvates (e.g., mixed ionic salts, water, organics), hydrates (e.g., water), and the like.

[0658] For example, compositions may include aqueous solution, powder form, granules, tablets, pills, suppositories, capsules, suspensions, sprays, and the like. The composition may be formulated according to the various routes of administration described below.

[0659] Where a TMMP of the present disclosure is administered as an injectable (e.g. subcutaneously, intraperitoneally, intramuscularly, and/or intravenously) directly into a tissue, a formulation can be provided as a ready-to-use dosage form, or as non-aqueous form (e.g. a reconstitutable storage-stable powder) or aqueous form, such as liquid composed of pharmaceutically acceptable carriers and excipients. The protein-containing formulations may also be provided so as to enhance serum half-life of the TMMP following administration. For example, the TMMP may be provided in a liposome formulation, prepared as a colloid, or other conventional techniques for extending serum half-life. A variety of methods are available for preparing liposomes, as described in, e.g., Szoka et al. 1980 Ann. Rev. Biophys. Bioeng. 9:467, U.S. Pat. Nos. 4,235,871, 4,501,728 and 4,837,028. The preparations may also be provided in controlled release or slow-release forms.

[0660] Other examples of formulations suitable for parenteral administration include isotonic sterile injection solutions, anti-oxidants, bacteriostats, and solutes that render the formulation isotonic with the blood of the intended recipient, suspending agents, solubilizers, thickening agents, stabilizers, and preservatives. For example, a subject pharmaceutical composition can be present in a container, e.g., a sterile container, such as a syringe. The formulations can be presented in unit-dose or multi-dose sealed containers, such as ampules and vials, and can be stored in a freeze-dried (lyophilized) condition requiring only the addition of the sterile liquid excipient, for example, water, for injections, immediately prior to use. Extemporaneous injection solutions and suspensions can be prepared from sterile powders, granules, and tablets.

[0661] The concentration of a TMMP of the present disclosure in a formulation can vary widely (e.g., from less than about 0.1%, usually at or at least about 2% to as much as 20% to 50% or more by weight) and will usually be selected primarily based on fluid volumes, viscosities, and patient-based factors in accordance with the particular mode of administration selected and the patient's needs.

[0662] The present disclosure provides a container comprising a composition of the present disclosure, e.g., a liquid composition. The container can be, e.g., a syringe, an ampoule, and the like. In some cases, the container is sterile. In some cases, both the container and the composition are sterile.

[0663] The present disclosure provides compositions, including pharmaceutical compositions, comprising a TMMP of the present disclosure. A composition can comprise: a) a TMMP of the present disclosure; and b) an excipient, as described above. In some cases, the excipient is a pharmaceutically acceptable excipient.

[0664] In some cases, a TMMP of the present disclosure is present in a liquid composition. Thus, the present disclosure provides compositions (e.g., liquid compositions, including pharmaceutical compositions) comprising a TMMP of the present disclosure. In some cases, a composition of the present disclosure comprises: a) a TMMP of the present disclosure; and b) saline (e.g., 0.9% NaCl). In some cases, the composition is sterile. In some cases, the composition is suitable for administration to a human subject, e.g., where the composition is sterile and is free of detectable pyrogens and/or other toxins. Thus, the present disclosure provides a composition comprising: a) a TMMP of the present disclosure; and b) saline (e.g., 0.9% NaCl), where the composition is sterile and is free of detectable pyrogens and/or other toxins.

### Compositions Comprising a Nucleic Acid or a Recombinant Expression Vector

[0665] The present disclosure provides compositions, e.g., pharmaceutical compositions, comprising a nucleic acid or a recombinant expression vector of the present disclosure. A wide variety of pharmaceutically acceptable excipients is known in the art and need not be discussed in detail herein. Pharmaceutically acceptable excipients have been amply described in a variety of publications, including, for example, A. Gennaro (2000) “Remington: The Science and Practice of Pharmacy”, 20th edition, Lippincott, Williams, & Wilkins; Pharmaceutical Dosage Forms and Drug Delivery Systems (1999) H. C. Ansel et al., eds 7^{th} ed., Lippincott, Williams, & Wilkins; and Handbook of Pharmaceutical Excipients (2000) A. H. Kibbe et al., eds., 3^{rd} ed. Amer. Pharmaceutical Assoc.

[0666] A composition of the present disclosure can include: a) one or more nucleic acids or one or more recombinant expression vectors comprising nucleotide sequences encoding a TMMP; and b) one or more of: a buffer, a surfactant, an antioxidant, a hydrophilic polymer, a dextrin, a chelating agent, a suspending agent, a solubilizer, a thickening agent, a stabilizer, a bacteriostatic agent, a wetting agent, and a preservative. Suitable buffers include, but are not limited to, (such as N,N-bis(2-hydroxyethyl)-2-aminoethanesulfonic acid (BES), bis(2-hydroxyethyl)amino-tris(hydroxymethyl)methane (BIS-Tris), N-(2-hydroxyethyl)piperazine-N′3-propanesulfonic acid (EPPS or HEPPS), glycylglycine, N-2-hydroxyehtylpiperazine-N′-2-ethanesulfonic acid (HEPES), 3-(N-morpholino)propane sulfonic acid (MOPS), piperazine-N,N′-bis(2-ethane-sulfonic acid) (PIPES), sodium bicarbonate, 3-(N-tris(hydroxymethyl)-methyl-amino)-2-hydroxy-propanesulfonic acid) TAPSO, (N-tris(hydroxymethyl)methyl-2-aminoethanesulfonic acid (TES), N-tris(hydroxymethyl)methyl-glycine (Tricine), tris(hydroxymethyl)-aminomethane (Tris), etc.). Suitable salts include, e.g., NaCl, MgCl₂, KCl, MgSO₄, etc.

[0667] A pharmaceutical formulation of the present disclosure can include a nucleic acid or recombinant expression vector of the present disclosure in an amount of from about 0.001% to about 90% (w/w). In the description of formulations, below, “subject nucleic acid or recombinant expression vector” will be understood to include a nucleic acid or recombinant expression vector of the present disclosure. For example, in some cases, a subject formulation comprises a nucleic acid or recombinant expression vector of the present disclosure.

[0668] A subject nucleic acid or recombinant expression vector can be admixed, encapsulated, conjugated or otherwise associated with other compounds or mixtures of compounds; such compounds can include, e.g., liposomes or receptor-targeted molecules. A subject nucleic acid or recombinant expression vector can be combined in a formulation with one or more components that assist in uptake, distribution and/or absorption.

[0669] A subject nucleic acid or recombinant expression vector composition can be formulated into any of many possible dosage forms such as, but not limited to, tablets, capsules, gel capsules, liquid syrups, soft gels, suppositories, and enemas. A subject nucleic acid or recombinant expression vector composition can also be formulated as suspensions in aqueous, non-aqueous or mixed media. Aqueous suspensions may further contain substances which increase the viscosity of the suspension including, for example, sodium carboxymethylcellulose, sorbitol and/or dextran. The suspension may also contain stabilizers.

[0670] A formulation comprising a subject nucleic acid or recombinant expression vector can be a liposomal formulation. As used herein, the term “liposome” means a vesicle composed of amphiphilic lipids arranged in a spherical bilayer or bilayers. Liposomes are unilamellar or multilamellar vesicles which have a membrane formed from a lipophilic material and an aqueous interior that contains the composition to be delivered. Cationic liposomes are positively charged liposomes that can interact with negatively charged DNA molecules to form a stable complex. Liposomes that are pH sensitive or negatively charged are believed to entrap DNA rather than complex with it. Both cationic and noncationic liposomes can be used to deliver a subject nucleic acid or recombinant expression vector.

[0671] Liposomes also include “sterically stabilized” liposomes, a term which, as used herein, refers to liposomes comprising one or more specialized lipids that, when incorporated into liposomes, result in enhanced circulation lifetimes relative to liposomes lacking such specialized lipids. Examples of sterically stabilized liposomes are those in which part of the vesicle-forming lipid portion of the liposome comprises one or more glycolipids or is derivatized with one or more hydrophilic polymers, such as a polyethylene glycol (PEG) moiety. Liposomes and their uses are further described in U.S. Pat. No. 6,287,860, which is incorporated herein by reference in its entirety.

[0672] The formulations and compositions of the present disclosure may also include surfactants. The use of surfactants in drug products, formulations and in emulsions is well known in the art. Surfactants and their uses are further described in U.S. Pat. No. 6,287,860.

[0673] In one embodiment, various penetration enhancers are included, to effect the efficient delivery of nucleic acids. In addition to aiding the diffusion of non-lipophilic drugs across cell membranes, penetration enhancers also enhance the permeability of lipophilic drugs. Penetration enhancers may be classified as belonging to one of five broad categories, i.e., surfactants, fatty acids, bile salts, chelating agents, and non-chelating non-surfactants. Penetration enhancers and their uses are further described in U.S. Pat. No. 6,287,860, which is incorporated herein by reference in its entirety.

[0674] Compositions and formulations for oral administration include powders or granules, microparticulates, nanoparticulates, suspensions or solutions in water or non-aqueous media, capsules, gel capsules, sachets, tablets, or minitablets. Thickeners, flavoring agents, diluents, emulsifiers, dispersing aids or binders may be desirable. Suitable oral formulations include those in which a subject antisense nucleic acid is administered in conjunction with one or more penetration enhancers surfactants and chelators. Suitable surfactants include, but are not limited to, fatty acids and/or esters or salts thereof, bile acids and/or salts thereof. Suitable bile acids/salts and fatty acids and their uses are further described in U.S. Pat. No. 6,287,860. Also suitable are combinations of penetration enhancers, for example, fatty acids/salts in combination with bile acids/salts. An exemplary suitable combination is the sodium salt of lauric acid, capric acid, and UDCA. Further penetration enhancers include, but are not limited to, polyoxyethylene-9-lauryl ether, and polyoxyethylene-20-cetyl ether. Suitable penetration enhancers also include propylene glycol, dimethylsulfoxide, triethanoiamine, N,N-dimethylacetamide, N,N-dimethylformamide, 2-pyrrolidone and derivatives thereof, tetrahydrofurfuryl alcohol, and AZONE™

### Methods of Modulating T Cell Activity

[0675] The present disclosure provides a method of selectively modulating the activity of an epitope-specific T cell, the method comprising contacting the T cell with a TMMP of the present disclosure, where contacting the T cell with a TMMP of the present disclosure selectively modulates the activity of the epitope-specific T cell. In some cases, the contacting occurs in vitro. In some cases, the contacting occurs in vivo. In some cases, the contacting occurs ex vivo.

[0676] In some cases, e.g., where the target T cell is a CD8⁺ T cell, the TMMP comprises Class I MHC polypeptides (e.g., β2-microglobulin and Class I MHC heavy chain).

[0677] Where a TMMP of the present disclosure includes an immunomodulatory polypeptide that is an activating polypeptide, contacting the T cell with the TMMP activates the epitope-specific T cell. In some instances, the epitope-specific T cell is a T cell that is specific for an epitope present on a cancer cell, and contacting the epitope-specific T cell with the TMMP increases cytotoxic activity of the T cell toward the cancer cell. In some instances, the epitope-specific T cell is a T cell that is specific for an epitope present on a cancer cell, and contacting the epitope-specific T cell with the TMMP increases the number of the epitope-specific T cells.

[0678] In some instances, the epitope-specific T cell is a T cell that is specific for an epitope present on a virus-infected cell, and contacting the epitope-specific T cell with the TMMP increases cytotoxic activity of the T cell toward the virus-infected cell. In some instances, the epitope-specific T cell is a T cell that is specific for an epitope present on a virus-infected cell, and contacting the epitope-specific T cell with the TMMP increases the number of the epitope-specific T cells.

[0679] In some instances, a TMMP of the present disclosure includes: i) an immunomodulatory polypeptide that is an activating polypeptide; ii) a virus peptide epitope (e.g., a virus-encoded peptide); and iii) a TTP that targets a cancer cell; and the TMMP is contacted with a T cell that is specific for the viral epitope present in the TMMP. In these instances, contacting the viral epitope-specific T cell with the TMMP activates the viral epitope-specific T cell and/or increases proliferation of the viral epitope-specific T cell. In some cases, contacting the viral epitope-specific T cell with the TMMP increases the number and/or cytotoxic activity of the T cell toward a cancer cell that is targeted by the TTP present in the TMMP. As one non-limiting example, where a TMMP of the present disclosure comprises: i) an immunomodulatory polypeptide that is an activating polypeptide (e.g., an IL-2 polypeptide); ii) a CMV peptide as the peptide epitope; and iii) a TTP that is a scFv that binds Her2, contacting the TMMP with a cytotoxic T cell that binds the CMV peptide activates the T cell and increases its cytotoxic activity toward a Her2-expressing cancer cell.

[0680] Where a TMMP of the present disclosure includes an immunomodulatory polypeptide that is an inhibiting polypeptide, contacting the T cell with the TMMP inhibits the epitope-specific T cell. In some instances, the epitope-specific T cell is a self-reactive T cell that is specific for an epitope present in a self antigen, and the contacting reduces the number of the self-reactive T cells.

[0681] The present disclosure provides a method of modulating an immune response in an individual, the method comprising administering to the individual an effective amount of a TMMP of the present disclosure. Administering the TMMP induces an epitope-specific T cell response (e.g., cancer epitope-specific T-cell response; a virus epitope-specific) and an epitope-non-specific T cell response, where the ratio of the epitope-specific T cell response to the epitope-non-specific T cell response is at least 2:1. In some cases, the ratio of the epitope-specific T cell response to the epitope-non-specific T cell response is at least 5:1. In some cases, the ratio of the epitope-specific T cell response to the epitope-non-specific T cell response is at least 10:1. In some cases, the ratio of the epitope-specific T cell response to the epitope-non-specific T cell response is at least 25:1. In some cases, the ratio of the epitope-specific T cell response to the epitope-non-specific T cell response is at least 50:1. In some cases, the ratio of the epitope-specific T cell response to the epitope-non-specific T cell response is at least 100:1. In some cases, the individual is a human. In some cases, the modulating increases a cytotoxic T-cell response to a cancer cell, e.g., a cancer cell expressing an antigen that displays the same epitope displayed by the peptide epitope present in the TMMP. In some cases, the modulating increases a cytotoxic T-cell response to a cancer cell, e.g., a cancer cell expressing an antigen that is targeted by the TTP present in the TMMP. In some cases, the administering is intravenous, subcutaneous, intramuscular, systemic, intralymphatic, distal to a treatment site, local, or at or near a treatment site.

[0682] The present disclosure provides a method of delivering a costimulatory (i.e., immunomodulatory) polypeptide selectively to target T cell, the method comprising contacting a mixed population of T cells with a TMMP of the present disclosure, where the mixed population of T cells comprises the target T cell and non-target T cells, where the target T cell is specific for the epitope present within the TMMP (e.g., where the target T cell is specific for the epitope present within the TMMP), and where the contacting step delivers the one or more costimulatory polypeptides (immunomodulatory polypeptides) present within the TMMP to the target T cell. In some cases, the population of T cells is in vitro. In some cases, the population of T cells is in vivo in an individual. In some cases, the method comprises administering the TMMP to the individual. In some case, the T cell is a cytotoxic T cell. In some cases, the mixed population of T cells is an in vitro population of mixed T cells obtained from an individual, and the contacting step results in activation and/or proliferation of the target T cell, generating a population of activated and/or proliferated target T cells; in some of these instances, the method further comprises administering the population of activated and/or proliferated target T cells to the individual.

[0683] The present disclosure provides a method of detecting, in a mixed population of T cells obtained from an individual, the presence of a target T cell that binds an epitope of interest (e.g., a cancer epitope, a virus epitope), the method comprising: a) contacting in vitro the mixed population of T cells with a TMMP of the present disclosure, wherein the TMMP comprises the epitope of interest (e.g., the cancer epitope, the virus epitope); and b) detecting activation and/or proliferation of T cells in response to said contacting, wherein activated and/or proliferated T cells indicates the presence of the target T cell.

### Treatment Methods

[0684] The present disclosure provides a method of treatment of an individual, the method comprising administering to the individual an amount of a TMMP of the present disclosure, or one or more nucleic acids encoding the TMMP, effective to treat the individual. Also provided is a TMMP of the present disclosure for use in a method of treatment of the human or animal body. In some cases, a treatment method of the present disclosure comprises administering to an individual in need thereof one or more recombinant expression vectors comprising nucleotide sequences encoding a TMMP of the present disclosure. In some cases, a treatment method of the present disclosure comprises administering to an individual in need thereof one or more mRNA molecules comprising nucleotide sequences encoding a TMMP of the present disclosure. In some cases, a treatment method of the present disclosure comprises administering to an individual in need thereof a TMMP of the present disclosure. Conditions that can be treated include, e.g., cancer and autoimmune disorders, as described below.

[0685] A TMMP of the present disclosure can both: 1) modulate the activity of an epitope-specific T cell (e.g., a T cell specific for the epitope present in the TMMP); and 2) target the TMMP to a target cell. For example, in some cases, a TMMP of the present disclosure: 1) induces a cytotoxic T cell response to a cancer-associated epitope present in the TMMP; and 2) targets the TMMP to a cancer cell. A TMMP of the present disclosure can both: 1) modulate the activity of an epitope-specific T cell (e.g., a T cell specific for the epitope present in the TMMP); and 2) target the TMMP to a target cell. For example, in some cases, a TMMP of the present disclosure: 1) induces a cytotoxic T cell response to a viral epitope present in the TMMP; and 2) targets the TMMP to a cancer cell.

[0686] In some cases, a TMMP of the present disclosure, when administered to an individual in need thereof, induces both an epitope-specific T cell response and an epitope non-specific T cell response. In other words, in some cases, a TMMP of the present disclosure, when administered to an individual in need thereof, induces an epitope-specific T cell response by modulating the activity of a first T cell that displays both: i) a TCR specific for the epitope present in the TMMP; ii) a co-immunomodulatory polypeptide that binds to the immunomodulatory polypeptide present in the TMMP; and induces an epitope non-specific T cell response by modulating the activity of a second T cell that displays: i) a TCR specific for an epitope other than the epitope present in the TMMP; and ii) a co-immunomodulatory polypeptide that binds to the immunomodulatory polypeptide present in the TMMP. The ratio of the epitope-specific T cell response to the epitope-non-specific T cell response is at least 2:1, at least 5:1, at least 10:1, at least 15:1, at least 20:1, at least 25:1, at least 50:1, or at least 100:1. The ratio of the epitope-specific T cell response to the epitope-non-specific T cell response is from about 2:1 to about 5:1, from about 5:1 to about 10:1, from about 10:1 to about 15:1, from about 15:1 to about 20:1, from about 20:1 to about 25:1, from about 25:1 to about 50:1, or from about 50:1 to about 100:1, or more than 100:1. “Modulating the activity” of a T cell can include one or more of: i) activating a cytotoxic (e.g., CD8+) T cell; ii) inducing cytotoxic activity of a cytotoxic (e.g., CD8+) T cell; iii) inducing production and release of a cytotoxin (e.g., a perforin; a granzyme; a granulysin) by a cytotoxic (e.g., CD8+) T cell; iv) inhibiting activity of an autoreactive T cell; and the like.

[0687] The combination of the reduced affinity of the immunomodulatory polypeptide for its cognate co-immunomodulatory polypeptide, and the affinity of the epitope for a TCR, provides for enhanced selectivity of a TMMP of the present disclosure. Thus, for example, a TMMP of the present disclosure binds with higher avidity to a first T cell that displays both: i) a TCR specific for the epitope present in the TMMP; and ii) a co-immunomodulatory polypeptide that binds to the immunomodulatory polypeptide present in the TMMP, compared to the avidity to which it binds to a second T cell that displays: i) a TCR specific for an epitope other than the epitope present in the TMMP; and ii) a co-immunomodulatory polypeptide that binds to the immunomodulatory polypeptide present in the TMMP.

[0688] The present disclosure provides a method of selectively modulating the activity of an epitope-specific T cell in an individual, the method comprising administering to the individual an effective amount of a TMMP of the present disclosure, or one or more nucleic acids (e.g., expression vectors; mRNA; etc.) comprising nucleotide sequences encoding the TMMP, where the TMMP selectively modulates the activity of the epitope-specific T cell in the individual. Selectively modulating the activity of an epitope-specific T cell can treat a disease or disorder in the individual. Thus, the present disclosure provides a treatment method comprising administering to an individual in need thereof an effective amount of a TMMP of the present disclosure.

[0689] In some cases, the immunomodulatory polypeptide (“MOD”) is an activating polypeptide, and the TMMP activates the epitope-specific T cell. In some cases, the epitope is a cancer-associated epitope, and the TMMP increases the activity of a T cell specific for the cancer-associate epitope. In some cases, the MOD is an activating polypeptide, and the TMMP activates an epitope-specific T-cell. In some cases, the T cells are T-helper cells (CD4⁺ cells), cytotoxic T-cells (CD8⁺ cells), or NK-T-cells. In some cases, the epitope is a cancer epitope, and the TMMP increases the activity of a T-cell specific for a cancer cell expressing the cancer epitope (e.g., T-helper cells (CD4⁺ cells), cytotoxic T-cells (CD8⁺ cells), and/or NK-T-cells). In some cases, the epitope is a viral epitope, and the TTP targets a cancer cell; and the TMMP increases the activity of T-cells (e.g., T-helper cells (CD4⁺ cells), cytotoxic T-cells (CD8⁺ cells), and/or NK-T-cells) specific for the viral epitope present in the TMMP, where the T-cell activity is directed to a cancer cell expressing the cancer epitope bound by the TTP. Activation of CD4⁺ T cells can include increasing proliferation of CD4⁺ T cells and/or inducing or enhancing release cytokines by CD4⁺ T cells. Activation of NK-T-cells and/or CD8⁺ cells can include: increasing proliferation of NK-T-cells and/or CD8⁺ cells; and/or inducing release of cytokines such as interferon γ by NK-T-cells and/or CD8⁺ cells. In some cases, a TMMP of the present disclosure reduces proliferation and/or activity of a regulatory T (Treg) cell. Tregs are FoxP3⁺, CD4⁺ T cells. In some cases, e.g., where a TMMP of the present disclosure comprises an inhibitory immunomodulatory polypeptide (e.g., PD-L1, FasL, and the like), the TMMP reduces the proliferation and/or activity of a Treg.

[0690] Where a TMMP of the present disclosure comprises a cancer-associated epitope, the TMMP can be administered to an individual in need thereof to treat a cancer in the individual, where the cancer expresses the cancer epitope present in the TMMP. The present disclosure provides a method of treating cancer in an individual, the method comprising administering to the individual an effective amount of a TMMP of the present disclosure, or one or more nucleic acids (e.g., expression vectors; mRNA; etc.) comprising nucleotide sequences encoding the TMMP, where the TMMP comprises a T-cell epitope that is a cancer epitope, and where the TMMP comprises a stimulatory immunomodulatory polypeptide.

[0691] Cancers that can be treated with a method of the present disclosure include any cancer that can be targeted with a TTP. Cancers that can be treated with a method of the present disclosure include carcinomas, sarcomas, melanoma, leukemias, and lymphomas. Cancers that can be treated with a method of the present disclosure include solid tumors. Cancers that can be treated with a method of the present disclosure include metastatic cancers.

[0692] Carcinomas that can treated by a method disclosed herein include, but are not limited to, esophageal carcinoma, hepatocellular carcinoma, basal cell carcinoma (a form of skin cancer), squamous cell carcinoma (various tissues), bladder carcinoma, including transitional cell carcinoma (a malignant neoplasm of the bladder), bronchogenic carcinoma, colon carcinoma, colorectal carcinoma, gastric carcinoma, lung carcinoma, including small cell carcinoma and non-small cell carcinoma of the lung, adrenocortical carcinoma, thyroid carcinoma, pancreatic carcinoma, breast carcinoma, ovarian carcinoma, prostate carcinoma, adenocarcinoma, sweat gland carcinoma, sebaceous gland carcinoma, papillary carcinoma, papillary adenocarcinoma, cystadenocarcinoma, medullary carcinoma, renal cell carcinoma, ductal carcinoma in situ or bile duct carcinoma, choriocarcinoma, seminoma, embryonal carcinoma, Wilm's tumor, cervical carcinoma, uterine carcinoma, testicular carcinoma, osteogenic carcinoma, epithelial carcinoma, and nasopharyngeal carcinoma.

[0693] Sarcomas that can be treated by a method disclosed herein include, but are not limited to, fibrosarcoma, myxosarcoma, liposarcoma, chondrosarcoma, chordoma, osteogenic sarcoma, osteosarcoma, angiosarcoma, endotheliosarcoma, lymphangiosarcoma, lymphangioendotheliosarcoma, synovioma, mesothelioma, Ewing's sarcoma, leiomyosarcoma, rhabdomyosarcoma, and other soft tissue sarcomas.

[0694] Other solid tumors that can be treated by a method disclosed herein include, but are not limited to, glioma, astrocytoma, medulloblastoma, craniopharyngioma, ependymoma, pinealoma, hemangioblastoma, acoustic neuroma, oligodendroglioma, menangioma, melanoma, neuroblastoma, and retinoblastoma.

[0695] Leukemias that can be amenable to therapy by a method disclosed herein include, but are not limited to, a) chronic myeloproliferative syndromes (neoplastic disorders of multipotential hematopoietic stem cells); b) acute myelogenous leukemias (neoplastic transformation of a multipotential hematopoietic stem cell or a hematopoietic cell of restricted lineage potential; c) chronic lymphocytic leukemias (CLL; clonal proliferation of immunologically immature and functionally incompetent small lymphocytes), including B-cell CLL, T-cell CLL prolymphocytic leukemia, and hairy cell leukemia; and d) acute lymphoblastic leukemias (characterized by accumulation of lymphoblasts). Lymphomas that can be treated using a subject method include, but are not limited to, B-cell lymphomas (e.g., Burkitt's lymphoma); Hodgkin's lymphoma; non-Hodgkin's lymphoma, and the like.

[0696] Other cancers that can be treated according to the methods disclosed herein include atypical meningioma, islet cell carcinoma, medullary carcinoma of the thyroid, mesenchymoma, hepatocellular carcinoma, hepatoblastoma, clear cell carcinoma of the kidney, and neurofibroma mediastinum.

[0697] Where a TMMP of the present disclosure comprises: i) a peptide epitope that when in an MHC/peptide complex of a TMMP presents a viral epitope; and ii) a TTP that targets a cancer-associated antigen, the TMMP can be administered to an individual in need thereof to treat a cancer in the individual, where: i) the TMMP activates a T-cell that is specific for the viral epitope; and ii) the cancer expresses the cancer epitope bound by the TTP. The present disclosure provides a method of treating cancer in an individual, the method comprising administering to the individual an effective amount of a TMMP of the present disclosure, or one or more nucleic acids (e.g., expression vectors; mRNA; etc.) comprising nucleotide sequences encoding the TMMP, where the TMMP comprises: i) a peptide epitope that when in an MHC/peptide complex of a TMMP presents a viral epitope; ii) a TTP that targets a cancer-associated antigen; and iii) a stimulatory immunomodulatory polypeptide (e.g., an IL-2 polypeptide; a 4-1BBL polypeptide; etc.).

[0698] In some cases, an “effective amount” of a TMMP of the present disclosure is an amount that, when administered in one or more doses to an individual in need thereof, reduces the number of cancer cells in the individual. For example, in some cases, an “effective amount” of a TMMP of the present disclosure is an amount that, when administered in one or more doses to an individual in need thereof, reduces the number of cancer cells in the individual by at least 10%, at least 15%, at least 20%, at least 25%, at least 30%, at least 40%, at least 50%, at least 60%, at least 70%, at least 80%, at least 90%, or at least 95%, compared to the number of cancer cells in the individual before administration of the TMMP, or in the absence of administration with the TMMP. In some cases, an “effective amount” of a TMMP of the present disclosure is an amount that, when administered in one or more doses to an individual in need thereof, reduces the number of cancer cells in the individual to undetectable levels.

[0699] In some cases, an “effective amount” of a TMMP of the present disclosure is an amount that, when administered in one or more doses to an individual in need thereof, reduces the tumor mass in the individual. For example, in some cases, an “effective amount” of a TMMP of the present disclosure is an amount that, when administered in one or more doses to an individual in need thereof (an individual having a tumor), reduces the tumor mass in the individual by at least 10%, at least 15%, at least 20%, at least 25%, at least 30%, at least 40%, at least 50%, at least 60%, at least 70%, at least 80%, at least 90%, or at least 95%, compared to the tumor mass in the individual before administration of the TMMP, or in the absence of administration with the TMMP. In some cases, an “effective amount” of a TMMP of the present disclosure is an amount that, when administered in one or more doses to an individual in need thereof (an individual having a tumor), reduces the tumor volume in the individual. For example, in some cases, an “effective amount” of a TMMP of the present disclosure is an amount that, when administered in one or more doses to an individual in need thereof (an individual having a tumor), reduces the tumor volume in the individual by at least 10%, at least 15%, at least 20%, at least 25%, at least 30%, at least 40%, at least 50%, at least 60%, at least 70%, at least 80%, at least 90%, or at least 95%, compared to the tumor volume in the individual before administration of the TMMP, or in the absence of administration with the TMMP. In some cases, an “effective amount” of a TMMP of the present disclosure is an amount that, when administered in one or more doses to an individual in need thereof, increases survival time of the individual. For example, in some cases, an “effective amount” of a TMMP of the present disclosure is an amount that, when administered in one or more doses to an individual in need thereof, increases survival time of the individual by at least 1 month, at least 2 months, at least 3 months, from 3 months to 6 months, from 6 months to 1 year, from 1 year to 2 years, from 2 years to 5 years, from 5 years to 10 years, or more than 10 years, compared to the expected survival time of the individual in the absence of administration with the TMMP.

[0700] In some instances, the epitope-specific T cell is a T cell that is specific for an epitope present on a virus-infected cell, and contacting the epitope-specific T cell with the TMMP increases cytotoxic activity of the T cell toward the virus-infected cell. In some instances, the epitope-specific T cell is a T cell that is specific for an epitope present on a virus-infected cell, and contacting the epitope-specific T cell with the TMMP increases the number of the epitope-specific T cells.

[0701] Thus, the present disclosure provides a method of treating a virus infection in an individual, the method comprising administering to the individual an effective amount of a TMMP of the present disclosure, or one or more nucleic acids comprising nucleotide sequences encoding the TMMP, where the TMMP comprises a T-cell epitope that is a viral epitope, and where the TMMP comprises a stimulatory immunomodulatory polypeptide. In some cases, an “effective amount” of a TMMP is an amount that, when administered in one or more doses to an individual in need thereof, reduces the number of virus-infected cells in the individual. For example, in some cases, an “effective amount” of a TMMP of the present disclosure is an amount that, when administered in one or more doses to an individual in need thereof, reduces the number of virus-infected cells in the individual by at least 10%, at least 15%, at least 20%, at least 25%, at least 30%, at least 40%, at least 50%, at least 60%, at least 70%, at least 80%, at least 90%, or at least 95%, compared to the number of virus-infected cells in the individual before administration of the TMMP, or in the absence of administration with the TMMP. In some cases, an “effective amount” of a TMMP of the present disclosure is an amount that, when administered in one or more doses to an individual in need thereof, reduces the number of virus-infected cells in the individual to undetectable levels.

[0702] Thus, the present disclosure provides a method of treating an infection in an individual, the method comprising administering to the individual an effective amount of a TMMP of the present disclosure, or one or more nucleic acids comprising nucleotide sequences encoding the TMMP, where the TMMP comprises a T-cell epitope that is a pathogen-associated epitope, and where the TMMP comprises a stimulatory immunomodulatory polypeptide. In some cases, an “effective amount” of a TMMP of the present disclosure is an amount that, when administered in one or more doses to an individual in need thereof, reduces the number of pathogens in the individual. For example, in some cases, an “effective amount” of a TMMP of the present disclosure is an amount that, when administered in one or more doses to an individual in need thereof, reduces the number of pathogens in the individual by at least 10%, at least 15%, at least 20%, at least 25%, at least 30%, at least 40%, at least 50%, at least 60%, at least 70%, at least 80%, at least 90%, or at least 95%, compared to the number of pathogens in the individual before administration of the TMMP, or in the absence of administration with the TMMP. In some cases, an “effective amount” of a TMMP of the present disclosure is an amount that, when administered in one or more doses to an individual in need thereof, reduces the number of pathogens in the individual to undetectable levels. Pathogens include viruses, bacteria, protozoans, and the like.

[0703] In some cases, the immunomodulatory polypeptide is an inhibitory polypeptide, and the TMMP inhibits activity of the epitope-specific T cell. In some cases, the epitope is a self-epitope, and the TMMP selectively inhibits the activity of a T cell specific for the self-epitope.

[0704] The present disclosure provides a method of treating an autoimmune disorder in an individual, the method comprising administering to the individual an effective amount of a TMMP of the present disclosure, or one or more nucleic acids comprising nucleotide sequences encoding the TMMP, where the TMMP comprises a T-cell epitope that is a self epitope, and where the TMMP comprises an inhibitory immunomodulatory polypeptide. In some cases, an “effective amount” of a TMMP of the present disclosure is an amount that, when administered in one or more doses to an individual in need thereof, reduces the number self-reactive T cells by at least 10%, at least 15%, at least 20%, at least 25%, at least 30%, at least 40%, at least 50%, at least 60%, at least 70%, at least 80%, at least 90%, or at least 95%, compared to number of self-reactive T cells in the individual before administration of the TMMP, or in the absence of administration with the TMMP. In some cases, an “effective amount” of a TMMP is an amount that, when administered in one or more doses to an individual in need thereof, reduces production of Th2 cytokines in the individual. In some cases, an “effective amount” of a TMMP of the present disclosure is an amount that, when administered in one or more doses to an individual in need thereof, ameliorates one or more symptoms associated with an autoimmune disease in the individual.

[0705] As noted above, in some cases, in carrying out a subject treatment method, a TMMP of the present disclosure is administered to an individual in need thereof, as the TMMP per se. In other instances, in carrying out a subject treatment method, one or more nucleic acids comprising nucleotide sequences encoding a TMMP of the present disclosure is/are administering to an individual in need thereof. Thus, in other instances, one or more nucleic acids of the present disclosure, e.g., one or more recombinant expression vectors of the present disclosure, is/are administered to an individual in need thereof.

### Formulations

[0706] Suitable formulations are described above, where suitable formulations include a pharmaceutically acceptable excipient. In some cases, a suitable formulation comprises: a) a TMMP of the present disclosure; and b) a pharmaceutically acceptable excipient. In some cases, a suitable formulation comprises: a) a nucleic acid comprising a nucleotide sequence encoding a TMMP of the present disclosure; and b) a pharmaceutically acceptable excipient; in some instances, the nucleic acid is an mRNA. In some cases, a suitable formulation comprises: a) a first nucleic acid comprising a nucleotide sequence encoding the first polypeptide of a TMMP of the present disclosure; b) a second nucleic acid comprising a nucleotide sequence encoding the second polypeptide of a TMMP of the present disclosure; and c) a pharmaceutically acceptable excipient. In some cases, a suitable formulation comprises: a) a recombinant expression vector comprising a nucleotide sequence encoding a TMMP of the present disclosure; and b) a pharmaceutically acceptable excipient. In some cases, a suitable formulation comprises: a) a first recombinant expression vector comprising a nucleotide sequence encoding the first polypeptide of a TMMP of the present disclosure; b) a second recombinant expression vector comprising a nucleotide sequence encoding the second polypeptide of a TMMP of the present disclosure; and c) a pharmaceutically acceptable excipient.

[0707] Suitable pharmaceutically acceptable excipients are described above.

### Dosages

[0708] A suitable dosage can be determined by an attending physician or other qualified medical personnel, based on various clinical factors. As is well known in the medical arts, dosages for any one patient depend upon many factors, including the patient's size, body surface area, age, the particular polypeptide or nucleic acid to be administered, sex of the patient, time, and route of administration, general health, and other drugs being administered concurrently. A TMMP of the present disclosure may be administered in amounts between 1 ng/kg body weight and 20 mg/kg body weight per dose, e.g. between 0.1 mg/kg body weight to 10 mg/kg body weight, e.g. between 0.5 mg/kg body weight to 5 mg/kg body weight; however, doses below or above this exemplary range are envisioned, especially considering the aforementioned factors. If the regimen is a continuous infusion, it can also be in the range of 1 μg to 10 mg per kilogram of body weight per minute. A TMMP of the present disclosure can be administered in an amount of from about 1 mg/kg body weight to 50 mg/kg body weight, e.g., from about 1 mg/kg body weight to about 5 mg/kg body weight, from about 5 mg/kg body weight to about 10 mg/kg body weight, from about 10 mg/kg body weight to about 15 mg/kg body weight, from about 15 mg/kg body weight to about 20 mg/kg body weight, from about 20 mg/kg body weight to about 25 mg/kg body weight, from about 25 mg/kg body weight to about 30 mg/kg body weight, from about 30 mg/kg body weight to about 35 mg/kg body weight, from about 35 mg/kg body weight to about 40 mg/kg body weight, or from about 40 mg/kg body weight to about 50 mg/kg body weight.

[0709] In some cases, a suitable dose of a TMMP of the present disclosure is from 0.01 μg to 100 μg per kg of body weight, from 0.1 μg to 10 μg per kg of body weight, from 1 μg to 1 μg per kg of body weight, from 10 μg to 100 mg per kg of body weight, from 100 μg to 10 mg per kg of body weight, or from 100 μg to 1 mg per kg of body weight. Persons of ordinary skill in the art can easily estimate repetition rates for dosing based on measured residence times and concentrations of the administered agent in bodily fluids or tissues. Following successful treatment, it may be desirable to have the patient undergo maintenance therapy to prevent the recurrence of the disease state, wherein a TMMP of the present disclosure is administered in maintenance doses, ranging from 0.01 μg to 100 μg per kg of body weight, from 0.1 μg to 10 μg per kg of body weight, from 1 μg to 1 μg per kg of body weight, from 10 μg to 100 mg per kg of body weight, from 100 μg to 10 mg per kg of body weight, or from 100 μg to 1 mg per kg of body weight.

[0710] Those of skill will readily appreciate that dose levels can vary as a function of the specific TMMP, the severity of the symptoms and the susceptibility of the subject to side effects. Preferred dosages for a given compound are readily determinable by those of skill in the art by a variety of means.

[0711] In some cases, multiple doses of a TMMP of the present disclosure, a nucleic acid of the present disclosure, or a recombinant expression vector of the present disclosure are administered. The frequency of administration of a TMMP of the present disclosure, a nucleic acid of the present disclosure, or a recombinant expression vector of the present disclosure can vary depending on any of a variety of factors, e.g., severity of the symptoms, etc. For example, in some cases, a TMMP of the present disclosure, a nucleic acid of the present disclosure, or a recombinant expression vector of the present disclosure is administered once per month, twice per month, three times per month, every other week (qow), once per week (qw), twice per week (biw), three times per week (tiw), four times per week, five times per week, six times per week, every other day (qod), daily (qd), twice a day (qid), or three times a day (tid).

[0712] The duration of administration of a TMMP of the present disclosure, a nucleic acid of the present disclosure, or a recombinant expression vector of the present disclosure, e.g., the period of time over which a TMMP of the present disclosure, a nucleic acid of the present disclosure, or a recombinant expression vector of the present disclosure is administered, can vary, depending on any of a variety of factors, e.g., patient response, etc. For example, a TMMP of the present disclosure, a nucleic acid of the present disclosure, or a recombinant expression vector of the present disclosure can be administered over a period of time ranging from about one day to about one week, from about two weeks to about four weeks, from about one month to about two months, from about two months to about four months, from about four months to about six months, from about six months to about eight months, from about eight months to about 1 year, from about 1 year to about 2 years, or from about 2 years to about 4 years, or more.

### Routes of Administration

[0713] An active agent (a TMMP of the present disclosure, a nucleic acid of the present disclosure, or a recombinant expression vector of the present disclosure) is administered to an individual using any available method and route suitable for drug delivery, including in vivo and ex vivo methods, as well as systemic and localized routes of administration.

[0714] Conventional and pharmaceutically acceptable routes of administration include intratumoral, peritumoral, intramuscular, intralymphatic, intratracheal, intracranial, subcutaneous, intradermal, topical application, intravenous, intraarterial, rectal, nasal, oral, and other enteral and parenteral routes of administration. Routes of administration may be combined, if desired, or adjusted depending upon the TMMP and/or the desired effect. A TMMP of the present disclosure, or a nucleic acid or recombinant expression vector of the present disclosure, can be administered in a single dose or in multiple doses.

[0715] In some cases, a TMMP of the present disclosure, a nucleic acid of the present disclosure, or a recombinant expression vector of the present disclosure is administered intravenously. In some cases, a TMMP of the present disclosure, a nucleic acid of the present disclosure, or a recombinant expression vector of the present disclosure is administered intramuscularly. In some cases, a TMMP of the present disclosure, a nucleic acid of the present disclosure, or a recombinant expression vector of the present disclosure is administered intralymphatically. In some cases, a TMMP of the present disclosure, a nucleic acid of the present disclosure, or a recombinant expression vector of the present disclosure is administered locally. In some cases, a TMMP of the present disclosure, a nucleic acid of the present disclosure, or a recombinant expression vector of the present disclosure is administered intratumorally. In some cases, a TMMP of the present disclosure, a nucleic acid of the present disclosure, or a recombinant expression vector of the present disclosure is administered peritumorally. In some cases, a TMMP of the present disclosure, a nucleic acid of the present disclosure, or a recombinant expression vector of the present disclosure is administered intracranially. In some cases, a TMMP of the present disclosure, a nucleic acid of the present disclosure, or a recombinant expression vector of the present disclosure is administered subcutaneously.

[0716] In some cases, a TMMP of the present disclosure is administered intravenously. In some cases, a TMMP of the present disclosure is administered intramuscularly. In some cases, a TMMP of the present disclosure is administered locally. In some cases, a TMMP the present disclosure is administered intratumorally. In some cases, a TMMP of the present disclosure is administered peritumorally. In some cases, a TMMP of the present disclosure is administered intracranially. In some cases, a TMMP is administered subcutaneously. In some cases, a TMMP of the present disclosure is administered intralymphatically.

[0717] A TMMP of the present disclosure, a nucleic acid of the present disclosure, or a recombinant expression vector of the present disclosure can be administered to a host using any available conventional methods and routes suitable for delivery of conventional drugs, including systemic or localized routes. In general, routes of administration contemplated for use in a method of the present disclosure include, but are not necessarily limited to, enteral, parenteral, and inhalational routes.

[0718] Parenteral routes of administration other than inhalation administration include, but are not necessarily limited to, topical, transdermal, subcutaneous, intramuscular, intraorbital, intracapsular, intraspinal, intrasternal, intratumoral, intralymphatic, peritumoral, and intravenous routes, i.e., any route of administration other than through the alimentary canal. Parenteral administration can be carried to effect systemic or local delivery of a TMMP of the present disclosure, a nucleic acid of the present disclosure, or a recombinant expression vector of the present disclosure. Where systemic delivery is desired, administration typically involves invasive or systemically absorbed topical or mucosal administration of pharmaceutical preparations.

### Subjects Suitable for Treatment

[0719] Subjects suitable for treatment with a method of the present disclosure include individuals who have cancer, including individuals who have been diagnosed as having cancer, individuals who have been treated for cancer but who failed to respond to the treatment, and individuals who have been treated for cancer and who initially responded but subsequently became refractory to the treatment. Subjects suitable for treatment with a method of the present disclosure include individuals who have an infection (e.g., an infection with a pathogen such as a bacterium, a virus, a protozoan, etc.), including individuals who have been diagnosed as having an infection, and individuals who have been treated for an infection but who failed to respond to the treatment. Subjects suitable for treatment with a method of the present disclosure include individuals who have bacterial infection, including individuals who have been diagnosed as having a bacterial infection, and individuals who have been treated for a bacterial infection but who failed to respond to the treatment. Subjects suitable for treatment with a method of the present disclosure include individuals who have a viral infection, including individuals who have been diagnosed as having a viral infection, and individuals who have been treated for a viral infection but who failed to respond to the treatment. Subjects suitable for treatment with a method of the present disclosure include individuals who have an autoimmune disease, including individuals who have been diagnosed as having an autoimmune disease, and individuals who have been treated for an autoimmune disease but who failed to respond to the treatment.

### Examples of Non-Limiting Aspects of the Disclosure

[0720] Aspects, including embodiments, of the present subject matter described above may be beneficial alone or in combination, with one or more other aspects or embodiments. Without limiting the foregoing description, certain non-limiting aspects of the disclosure numbered 1-49 are provided below. As will be apparent to those of skill in the art upon reading this disclosure, each of the individually numbered aspects may be used or combined with any of the preceding or following individually numbered aspects. This is intended to provide support for all such combinations of aspects and is not limited to combinations of aspects explicitly provided below:

[0721] Aspect 1. A T-cell modulatory multimeric polypeptide comprising:
[0722] at least one heterodimer comprising:
[0723] a) a first polypeptide comprising: i) a peptide epitope, wherein the peptide has a length of at least 4 amino acids; and ii) first major histocompatibility complex (MHC) polypeptide;
[0724] b) a second polypeptide comprising a second MHC polypeptide;
[0725] c) at least one immunomodulatory polypeptide, wherein the first and/or the second polypeptide comprises the immunomodulatory polypeptide;
[0726] d) an immunoglobulin (Ig) Fc polypeptide or a non-Ig scaffold, wherein the first and/or the second polypeptide comprises the Ig Fc polypeptide or the non-Ig scaffold; and
[0727] e) a tumor-targeting polypeptide, wherein the first and/or the second polypeptide comprises the tumor-targeting polypeptide.

[0728] Aspect 2. A T-cell modulatory multimeric polypeptide of aspect 1, wherein at least one of the one or more immunomodulatory domains is a variant immunomodulatory polypeptide that exhibits reduced affinity to a cognate co-immunomodulatory polypeptide compared to the affinity of a corresponding wild-type immunomodulatory polypeptide for the cognate co-immunomodulatory polypeptide, and wherein the epitope binds to a T-cell receptor (TCR) on a T cell with an affinity of at least 10⁻⁷ M, such that: i) the T-cell modulatory multimeric polypeptide binds to a first T cell with an affinity that is at least 25% higher than the affinity with which the T-cell modulatory multimeric polypeptide binds a second T cell, wherein the first T cell expresses on its surface the cognate co-immunomodulatory polypeptide and a TCR that binds the epitope with an affinity of at least 10⁻⁷ M, and wherein the second T cell expresses on its surface the cognate co-immunomodulatory polypeptide but does not express on its surface a TCR that binds the epitope with an affinity of at least 10⁻⁷ M; and/or ii) the ratio of the binding affinity of a control T-cell modulatory multimeric polypeptide, wherein the control comprises a wild-type immunomodulatory polypeptide, to a cognate co-immunomodulatory polypeptide to the binding affinity of the T-cell modulatory multimeric polypeptide comprising a variant of the wild-type immunomodulatory polypeptide to the cognate co-immunomodulatory polypeptide, when measured by bio-layer interferometry, is in a range of from 1.5:1 to 10⁶:1.

[0729] Aspect 3. A T-cell modulatory multimeric polypeptide of aspect 2, wherein: a) the T-cell modulatory multimeric polypeptide binds to the first T cell with an affinity that is at least 50%, at least 2-fold, at least 5-fold, or at least 10-fold higher than the affinity with which it binds the second T cell; and/or b) the variant immunomodulatory polypeptide binds the co-immunomodulatory polypeptide with an affinity of from about 10⁻⁴ M to about 10⁻⁷ M, from about 10⁻⁴ M to about 10⁻⁶ M, from about 10⁻⁴ M to about 10⁻⁵ M; and/or c) wherein the ratio of the binding affinity of a control T-cell modulatory multimeric polypeptide, wherein the control comprises a wild-type immunomodulatory polypeptide, to a cognate co-immunomodulatory polypeptide to the binding affinity of the T-cell modulatory multimeric polypeptide comprising a variant of the wild-type immunomodulatory polypeptide to the cognate co-immunomodulatory polypeptide, when measured by bio-layer interferometry, is at least 10:1, at least 50:1, at least 10²:1, or at least 10³:1.

[0730] Aspect 4. A T-cell modulatory multimeric polypeptide of any one of aspects 1-3, wherein the first or the second polypeptide comprises an Ig Fc polypeptide.

[0731] Aspect 5. A T-cell modulatory multimeric polypeptide of aspect 4, wherein the Ig Fc polypeptide is an IgG1 Fc polypeptide.

[0732] Aspect 6. A T-cell modulatory multimeric polypeptide of aspect 5, wherein IgG1 Fc polypeptide comprises one or more amino acid substitutions selected from N297A, L234A, L235A, L234F, L235E, and P331S.

[0733] Aspect 7. A T-cell modulatory multimeric polypeptide of any one of aspects 1-6, wherein

a1) the first polypeptide comprises, in order from N-terminus to C-terminus:

[0734] i) the peptide epitope;

[0735] ii) the first MHC polypeptide; and

[0736] iii) the at least one immunomodulatory polypeptide; and

b1) the second polypeptide comprises, in order from N-terminus to C-terminus:

[0737] i) the second MHC polypeptide;

[0738] ii) an Ig Fc polypeptide; and

[0739] iii) the tumor-targeting polypeptide; or

a2) the first polypeptide comprises, in order from N-terminus to C-terminus:

[0740] i) the peptide epitope; and

[0741] ii) the first MHC polypeptide; and

b2) the second polypeptide comprises, in order from N-terminus to C-terminus:

[0742] i) the at least one immunomodulatory polypeptide;

[0743] ii) the second MHC polypeptide;

[0744] iii) the Ig Fc polypeptide; and

[0745] iv) the tumor-targeting polypeptide; or

a3) the first polypeptide comprises, in order from N-terminus to C-terminus:

[0746] i) the peptide epitope; and

[0747] ii) the first MHC polypeptide;

[0748] iii) the at least one immunomodulatory polypeptide and

b3) the second polypeptide comprises, in order from N-terminus to C-terminus:

[0749] i) the second MHC polypeptide;

[0750] ii) the at least one immunomodulatory polypeptide;

[0751] iii) the Ig Fc polypeptide; and

[0752] iv) the tumor-targeting polypeptide; or

a4) the first polypeptide comprises, in order from N-terminus to C-terminus:

[0753] i) the peptide epitope;

[0754] ii) the first MHC polypeptide;

[0755] iii) the at least one immunomodulatory polypeptide; and

b4) the second polypeptide comprises, in order from N-terminus to C-terminus:

[0756] i) the at least one immunomodulatory polypeptide;

[0757] ii) the second MHC polypeptide;

[0758] iii) the Ig Fc polypeptide; and

[0759] iv) the tumor-targeting polypeptide; or

a5) the first polypeptide comprises, in order from N-terminus to C-terminus:

[0760] i) the at least one immunomodulatory polypeptide;

[0761] ii) the peptide epitope; and

[0762] ii) the first MHC polypeptide; and

b5) a second polypeptide comprises, in order from N-terminus to C-terminus:

[0763] i) the second MHC polypeptide;

[0764] ii) the Ig Fc polypeptide; and

[0765] iii) the tumor-targeting polypeptide; or

a6) the first polypeptide comprises, in order from N-terminus to C-terminus:

[0766] i) the peptide epitope; and

[0767] ii) the first MHC polypeptide; and

b6) the second polypeptide comprises, in order from N-terminus to C-terminus:

[0768] i) the second MHC polypeptide;

[0769] ii) the at least one immunomodulatory polypeptide;

[0770] iii) the Ig Fc polypeptide; and

[0771] iv) the tumor-targeting polypeptide; or

a7) the first polypeptide comprises, in order from N-terminus to C-terminus:

[0772] i) the peptide epitope;

[0773] ii) the first MHC polypeptide; and

[0774] iii) the at least one immunomodulatory polypeptide; and

b7) the second polypeptide comprises, in order from N-terminus to C-terminus:

[0775] i) the at least one immunomodulatory polypeptide;

[0776] ii) the second MHC polypeptide;

[0777] iii) the Ig Fc polypeptide; and

[0778] iv) the tumor-targeting polypeptide; or

a8) the first polypeptide comprises, in order from N-terminus to C-terminus:

[0779] i) the peptide epitope;

[0780] ii) the first MHC polypeptide; and

[0781] iii) the at least one immunomodulatory polypeptide; and

b8) the second polypeptide comprises, in order from N-terminus to C-terminus:

[0782] i) the second MHC polypeptide;

[0783] ii) the at least one immunomodulatory polypeptide;

[0784] iii) the Ig Fc polypeptide; and

[0785] iv) the tumor-targeting polypeptide; or

a9) the first polypeptide comprises, in order from N-terminus to C-terminus:

[0786] i) the peptide epitope; and

[0787] ii) the first MHC polypeptide; and

b9) the second polypeptide comprises, in order from N-terminus to C-terminus:

[0788] i) the tumor-targeting polypeptide;

[0789] ii) the second MHC polypeptide;

[0790] iii) the Ig Fc polypeptide; and

[0791] iv) the at least one immunomodulatory polypeptide; or

a10) the first polypeptide comprises, in order from N-terminus to C-terminus:

[0792] i) the peptide epitope; and

[0793] ii) the first MHC polypeptide; and

b10) the second polypeptide comprises, in order from N-terminus to C-terminus:

[0794] i) the tumor-targeting polypeptide;

[0795] ii) the second MHC polypeptide;

[0796] iii) the at least one immunomodulatory polypeptide; and

[0797] iv) the Ig Fc polypeptide; or

a11) the first polypeptide comprises, in order from N-terminus to C-terminus:

[0798] i) the peptide epitope;

[0799] ii) the first MHC polypeptide; and

[0800] iii) the tumor-targeting polypeptide; and

b11) the second polypeptide comprises, in order from N-terminus to C-terminus:

[0801] i) the at least one immunomodulatory polypeptide;

[0802] ii) the second MHC polypeptide; and

[0803] iii) the Ig Fc polypeptide; or

a12) the first polypeptide comprises, in order from N-terminus to C-terminus:

[0804] i) the peptide epitope;

[0805] ii) the first MHC polypeptide; and

[0806] iii) the tumor-targeting polypeptide; and

b12) the second polypeptide comprises, in order from N-terminus to C-terminus:

[0807] i) the second MHC polypeptide;

[0808] ii) the at least one immunomodulatory polypeptide; and

[0809] iii) the Ig Fc polypeptide.

[0810] Aspect 8. A T-cell modulatory multimeric polypeptide of any one of aspects 1-7, wherein the first polypeptide comprises a peptide linker between the epitope and the first MHC polypeptide and/or wherein the second polypeptide comprises a peptide linker between the immunomodulatory polypeptide and the second MHC polypeptide.

[0811] Aspect 9. A T-cell modulatory multimeric polypeptide of aspect 8, wherein the peptide linker comprises the amino acid sequence (GGGGS)n, where n is an integer from 1 to 10.

[0812] Aspect 10. A T-cell modulatory multimeric polypeptide of any one of aspects 1-9, wherein the first MHC polypeptide is a β2-microglobulin polypeptide; and wherein the second MHC polypeptide is an MHC class I heavy chain polypeptide.

[0813] Aspect 11. A T-cell modulatory multimeric polypeptide of any one of aspects 1-10, wherein the at least one immunomodulatory polypeptide is selected from the group consisting of a cytokine, a 4-1BBL polypeptide, a B7-1 polypeptide; a B7-2 polypeptide, an ICOS-L polypeptide, an OX-40L polypeptide, a CD80 polypeptide, a CD86 polypeptide, a PD-L1 polypeptide, a FasL polypeptide, a PD-L2 polypeptide, and combinations thereof.

[0814] Aspect 12. A T-cell modulatory multimeric polypeptide of any one of aspects 1-11, wherein the at least one immunomodulatory polypeptide is an IL-2 polypeptide.

[0815] Aspect 13. A T-cell modulatory multimeric polypeptide of any one of aspects 1-12, wherein the multimeric polypeptide comprises at least two immunomodulatory polypeptides, and wherein at least two of the immunomodulatory polypeptides are the same.

[0816] Aspect 14. A T-cell modulatory multimeric polypeptide of aspect 13, wherein the 2 or more immunomodulatory polypeptides are in tandem.

[0817] Aspect 15. A T-cell modulatory multimeric polypeptide of any one of aspects 1-14, wherein the tumor-targeting polypeptide is an antibody specific for a cancer-associated antigen on the surface of a cancer cell.

[0818] Aspect 16. A T-cell modulatory multimeric polypeptide of aspect 15, wherein the antibody is specific for Her2.

[0819] Aspect 17. A T-cell modulatory multimeric polypeptide of aspect 15, wherein the antibody is specific for CD19.

[0820] Aspect 18. A T-cell modulatory multimeric polypeptide of any one of aspects 15-17, wherein the antibody is a scFv.

[0821] Aspect 19. A T-cell modulatory multimeric polypeptide of any one of aspects 15-17, wherein the antibody is a nanobody.

[0822] Aspect 20. A T-cell modulatory multimeric polypeptide of any one of aspects 1-14, wherein the tumor-targeting polypeptide is an antibody specific for a cancer-associated peptide/MHC complex present on the surface of a cancer cell.

[0823] Aspect 21. A T-cell modulatory multimeric polypeptide of any one of aspects 1-14, wherein the tumor-targeting polypeptide is single-chain T-cell receptor specific for a cancer-associated antigen on the surface of a cancer cell.

[0824] Aspect 22. A T-cell modulatory multimeric polypeptide of any one of aspects 1-21, wherein the first polypeptide and the second polypeptide are covalently linked to one another.

[0825] Aspect 23. A T-cell modulatory multimeric polypeptide of aspect 22, wherein the covalent linkage is via a disulfide bond.

[0826] Aspect 24. A T-cell modulatory multimeric polypeptide of aspect 23, wherein the β2M polypeptide and the MHC heavy chain polypeptide are joined by a disulfide bond that joins a Cys residue in the β2M polypeptide and a Cys residue in the MHC heavy chain polypeptide.

[0827] Aspect 25. A T-cell modulatory multimeric polypeptide of aspect 24, wherein a Cys at amino acid residue 12 of the β2M polypeptide is disulfide bonded to a Cys at amino acid residue 236 of the MHC heavy chain polypeptide.

[0828] Aspect 26. A T-cell modulatory multimeric polypeptide of aspect 23, wherein the first polypeptide chain comprises a linker between the peptide epitope and the β2M polypeptide, and wherein the disulfide bond links a Cys present in the linker with a Cys of the MHC heavy chain polypeptide.

[0829] Aspect 27. A T-cell modulatory multimeric polypeptide of aspect 23, wherein the first polypeptide chain comprises a linker between the peptide epitope and the β2M polypeptide, and wherein the disulfide bond links a Cys substituted for Gly2 in the linker with a Cys substituted for Tyr84 of the MHC heavy chain polypeptide.

[0830] Aspect 28. A T-cell modulatory multimeric polypeptide of any one of aspects 1-27, wherein the first and the second polypeptides are covalently linked to one another via at least 2 disulfide bonds.

[0831] Aspect 29. A T-cell modulatory multimeric polypeptide of aspect 28, wherein: a) a first disulfide bond is between: i) a Cys present in a linker between the peptide epitope and the first MHC class I polypeptide, wherein the first MHC class I polypeptide is a β2M polypeptide; and ii) a Cys residue introduced via a Y84C substitution in the second MHC class I polypeptide, wherein the second MHC class I polypeptide is an MHC Class I heavy chain polypeptide; and b) a second disulfide bond is between: i) a Cys residue introduced into the β2M polypeptide via an R12C substitution; and ii) a Cys residue introduced into the MHC Class I heavy chain polypeptide via an A236C substitution.

[0832] Aspect 30. A T-cell modulatory multimeric polypeptide of aspect 29, wherein the linker comprises the amino acid sequence GCGGS (SEQ ID NO:139).

[0833] Aspect 31. A T-cell modulatory multimeric polypeptide of aspect 29, wherein the linker comprises the amino acid sequence GCGGS(GGGGS)n (SEQ ID NO:140), where n is an integer from 1 to 10.

[0834] Aspect 32. A T-cell modulatory multimeric polypeptide of any one of aspects 1-31, wherein the peptide epitope has a length of from about 4 amino acids to about 25 amino acids (e.g., 4 amino acids (aa), 5 aa, 6 aa, 7 aa, 8 aa, 9 aa, 10 aa, 11 aa, 12 aa, 13 aa, 14 aa, 15 aa, 16 aa, 17 aa, 18 aa, 19 aa, 20 aa, 21 aa, 22 aa, 23 aa, 24 aa, or 25 aa, including within a range of from 4 to 20 aa., from 6 to 18 aa., from 8 to 15 aa, from 8 to 12 aa., from 5 to 10 aa., from 10 to 15 aa., from 15 to 20 aa., from 10 to 20 aa., or from 15 to 25 aa, in length).

[0835] Aspect 33. A T-cell modulatory multimeric polypeptide of any one of aspects 1-32, wherein the peptide epitope is a cancer-associated peptide epitope.

[0836] Aspect 34. A T-cell modulatory multimeric polypeptide of any one of aspects 1-32, wherein the peptide epitope is a virus-associated peptide epitope.

[0837] Aspect 35. A T-cell modulatory multimeric polypeptide of any one of aspects 1-34, wherein the first or the second MHC polypeptide comprises: a) an amino acid sequence having at least 95% amino acid sequence identity to the HLA-A*0101, HLA-A*0201, HLA-A*0201, HLA-A*1101, HLA-A*2301, HLA-A*2402, HLA-A*2407, HLA-A*3303, or HLA-A*3401 amino acid sequence depicted in FIG. 7A; or b) an amino acid sequence having at least 95% amino acid sequence identity to the HLA-B*0702, HLA-B*0801, HLA-B*1502, HLA-B*3802, HLA-B*4001, HLA-B*4601, or HLA-B*5301 amino acid sequence depicted in FIG. 8A; or c) an amino acid sequence having at least 95% amino acid sequence identity to the HLA-C*0102, HLA-C*0303, HLA-C*0304, HLA-C*0401, HLA-C*0602, HLA-C*0701, HLA-C*0702, HLA-C*0801, or HLA-C*1502 depicted in FIG. 9A.

[0838] Aspect 36. A T-cell modulatory multimeric polypeptide of any one of aspects 1-35, wherein the first MHC polypeptide is a β2M polypeptide, and wherein the second MHC polypeptide comprises an amino acid sequence having at least 95% amino acid sequence identity to an HLA-A*2402 polypeptide.

[0839] Aspect 37. A T-cell modulatory multimeric polypeptide of any one of aspects 1-35, wherein the first MHC polypeptide is a β2M polypeptide, and wherein the second MHC polypeptide is an HLA-A*1101 polypeptide.

[0840] Aspect 38. A T-cell modulatory multimeric polypeptide of any one of aspects 1-35, wherein the first MHC polypeptide is a β2M polypeptide, and wherein the second MHC polypeptide comprises an amino acid sequence having at least 95% amino acid sequence identity to an HLA-A*3303 polypeptide.

[0841] Aspect 39. A T-cell modulatory multimeric polypeptide of any one of aspects 1-35, wherein the first MHC polypeptide is a β2M polypeptide, and wherein the second MHC polypeptide comprises an amino acid sequence having at least 95% amino acid sequence identity to an HLA-A*0201 polypeptide.

[0842] Aspect 40. A T-cell modulatory multimeric polypeptide of any one of aspects 1-39, wherein the immunomodulatory polypeptide is a variant IL-2 polypeptide comprising: i) an H16A substitution and an F42A substitution; or ii) an H16T substitution and an F42A substitution.

[0843] Aspect 41. A T-cell modulatory multimeric polypeptide of any one of aspects 1-40, wherein the multimeric polypeptide comprises a first and a second heterodimer, and wherein the first and second heterodimers are covalently bound by one or more disulfide bonds between the Ig Fc polypeptides of the first and second heterodimers.

[0844] Aspect 42. A nucleic acid comprising a nucleotide sequence encoding a first or second polypeptide according to any one of aspects 1-41, wherein the first or second polypeptide comprises at least one immunomodulatory polypeptide.

[0845] Aspect 43. An expression vector comprising the nucleic acid of aspect 42.

[0846] Aspect 44. A method of selectively modulating the activity of T cell specific for an epitope, the method comprising contacting the T cell with a T-cell modulatory multimeric polypeptide according to any one of aspects 1-41, wherein said contacting selectively modulates the activity of the epitope-specific T cell.

[0847] Aspect 45. A method of treating a patient having a cancer, the method comprising administering to the patient an effective amount of a pharmaceutical composition comprising T-cell modulatory multimeric polypeptide according to any one of aspects 1-41.

[0848] Aspect 46. The method of aspect 45, wherein the cancer is cervical cancer, prostate cancer, or ovarian cancer.

[0849] Aspect 47. The method of aspect 45 or 46, wherein said administering is intramuscular.

[0850] Aspect 48. The method of aspect 45 or 46, wherein said administering is intravenous.

[0851] Aspect 49. A method of modulating an immune response in an individual, the method comprising administering to the individual an effective amount of the T-cell modulatory multimeric polypeptide of any one of aspects 1-41, wherein said administering induces an epitope-specific T cell response and an epitope-non-specific T cell response, wherein the ratio of the epitope-specific T cell response to the epitope-non-specific T cell response is at least 2:1.

### EXAMPLES

[0852] The following examples are put forth so as to provide those of ordinary skill in the art with a complete disclosure and description of how to make and use the present invention, and are not intended to limit the scope of what the inventors regard as their invention nor are they intended to represent that the experiments below are all or the only experiments performed. Efforts have been made to ensure accuracy with respect to numbers used (e.g. amounts, temperature, etc.) but some experimental errors and deviations should be accounted for. Unless indicated otherwise, parts are parts by weight, molecular weight is weight average molecular weight, temperature is in degrees Celsius, and pressure is at or near atmospheric. Standard abbreviations may be used, e.g., bp, base pair(s); kb, kilobase(s); pl, picoliter(s); s or sec, second(s); min, minute(s); h or hr, hour(s); aa, amino acid(s); kb, kilobase(s); bp, base pair(s); nt, nucleotide(s); i.m., intramuscular(ly); i.p., intraperitoneal(ly); s.c., subcutaneous(ly); and the like.

### Example

[0853] A TMMP comprising polypeptide 1717 (FIG. 14B) and polypeptide 4012 (FIG. 15B) was made and tested. This TMMP comprises two heterodimers, each heterodimer comprising polypeptide 1717 and polypeptide 4012. The two heterodimers then self-assemble via the IgG1 Fc polypeptide present in polypeptide 4012 to form TMMP 4012-1717.

[0854] 4012: This polypeptide comprises: i) two copies of a reduced-affinity IL2 polypeptide (IL-2 (H16A; F42A) separated by a linker (GGGGSGGGGSGGGGSGGGGS; SEQ ID NO:380); ii) an HLA-A02 heavy chain (Y84C; A236C); iii) human IgG1 Fc (L234A; L235A); iv) an anti-CD19 scFv, as well as a linker (AAAGG; SEQ ID NO:387) between the HLA-A02 (Y84C; A236C) and the IgG1 Fc (L234A; L235A) and a linker (GGGGSGGGGSGGGGS; SEQ ID NO:379) between the IgG1 and anti-CD19 scFv.

[0855] 1717: This polypeptide comprises: i) a CMV peptide epitope; ii) a β2M polypeptide (R12C); and a linker (GCGGSGGGGSGGGGS; SEQ ID NO:138) between the CMV peptide epitope and the β2M (R12C) polypeptide.

[0856] Each heterodimer comprises: (i) a first disulfide bond between the Cys present in the linker between the CMV peptide epitope and the β2M (R12C) polypeptide and the Cys residue introduced via a Y84C of the HLA-A02 alpha chain, and (ii) a second disulfide bond between the Cys residue introduced into the β2M polypeptide via an R12C substitution and the Cys residue introduced into the MHC Class I heavy chain polypeptide via the A236C substitution. The two heterodimers were joined by disulfide bonds formed between their respective IgG1 Fc polypeptides.

[0857] The effect of a TMMP 4012-1717 on the cytolytic activity of CD8⁺ T cells from peripheral blood mononuclear cells (PBMCs) was tested against CD19⁺ Ramos cells was tested. CD8⁺ T cells were purified from two healthy donor PBMCs (“leukopak 37” and “leukopak 38”). Carboxyfluorescein succinimidyl ester (CFSE)-labelled Ramos cells were incubated with the purified CD8⁺ T cells at an effector-to-target ratio of 20:1 in the presence of increasing concentrations of 4012-1717. As positive control, cytolytic activity was assessed in the presence of an anti-CD3-anti-CD19 bi-specific T-cell engager (BiTE). As negative control, cytolytic activity was assessed in the presence of a βGal-antiCD19 BiTE. Upon 48 hours of culture, the cells were washed and labelled with a live-dead stain. Percentage of live target cells were assessed by flow cytometry. The data are shown in FIG. 16A and FIG. 16B.

[0858] As shown in FIGS. 16A and 16B, treatment with 4012-1717 induced CD8⁺ T cell cytolytic activity in both tested donors. Positive and negative controls demonstrated expected activities.

[0859] While the present invention has been described with reference to the specific embodiments thereof, it should be understood by those skilled in the art that various changes may be made and equivalents may be substituted without departing from the true spirit and scope of the invention. In addition, many modifications may be made to adapt a particular situation, material, composition of matter, process, process step or steps, to the objective, spirit and scope of the present invention. All such modifications are intended to be within the scope of the claims appended hereto.

What is claimed is:

1. A T-cell modulatory multimeric polypeptide comprising:
at least one heterodimer comprising:
a) a first polypeptide comprising:
i) a peptide epitope, wherein the peptide epitope is a peptide having a length of at least 4 amino acids; and
ii) first major histocompatibility complex (MHC) polypeptide;
b) a second polypeptide comprising a second MHC polypeptide;
c) at least one immunomodulatory polypeptide, wherein the first and/or the second polypeptide comprises the at least one immunomodulatory polypeptide;
d) an immunoglobulin (Ig) Fc polypeptide or a non-Ig scaffold, wherein the first and/or the second polypeptide comprises the Ig Fc polypeptide or the non-Ig scaffold; and
e) a tumor-targeting polypeptide, wherein the first and/or the second polypeptide comprises the tumor-targeting polypeptide.

2. A T-cell modulatory multimeric polypeptide of claim 1, wherein at least one of the one or more immunomodulatory polypeptides is a variant immunomodulatory polypeptide that exhibits reduced affinity to a cognate co-immunomodulatory polypeptide compared to the affinity of a corresponding wild-type immunomodulatory polypeptide for the cognate co-immunomodulatory polypeptide.

3. A T-cell modulatory multimeric polypeptide of claim 2, wherein the epitope binds to a T-cell receptor (TCR) on a T cell with an affinity of at least 10⁻⁷ M,
such that:
i) the T-cell modulatory multimeric polypeptide binds to a first T cell with an affinity that is at least 25% higher than the affinity with which the T-cell modulatory multimeric polypeptide binds a second T cell,
wherein the first T cell expresses on its surface the cognate co-immunomodulatory polypeptide and a TCR that binds the epitope with an affinity of at least 10⁻⁷M, and
wherein the second T cell expresses on its surface the cognate co-immunomodulatory polypeptide but does not express on its surface a TCR that binds the epitope with an affinity of at least 10⁻⁷ M; and/or
ii) the ratio of the binding affinity of a control T-cell modulatory multimeric polypeptide, wherein the control comprises a wild-type immunomodulatory polypeptide, to a cognate co-immunomodulatory polypeptide to the binding affinity of the T-cell modulatory multimeric polypeptide comprising a variant of the wild-type immunomodulatory polypeptide to the cognate co-immunomodulatory polypeptide, when measured by bio-layer interferometry, is in a range of from 1.5:1 to 10⁶:1.

4. A T-cell modulatory multimeric polypeptide of claim 3, wherein:
a) the T-cell modulatory multimeric polypeptide binds to the first T cell with an affinity that is at least 50%, at least 2-fold, at least 5-fold, or at least 10-fold higher than the affinity with which it binds the second T cell; and/or
b) the variant immunomodulatory polypeptide binds the co-immunomodulatory polypeptide with an affinity of from about 10⁻⁴ M to about 10⁻⁷ M, from about 10⁻⁴ M to about 10⁻⁶ M, from about 10⁻⁴ M to about 10⁻⁵ M; and/or
c) wherein the ratio of the binding affinity of a control T-cell modulatory multimeric polypeptide, wherein the control comprises a wild-type immunomodulatory polypeptide, to a cognate co-immunomodulatory polypeptide to the binding affinity of the T-cell modulatory multimeric polypeptide comprising a variant of the wild-type immunomodulatory polypeptide to the cognate co-immunomodulatory polypeptide, when measured by bio-layer interferometry, is at least 10:1, at least 50:1, at least 10²:1, or at least 10³:1.

5. A T-cell modulatory multimeric polypeptide of any one of claims 1-4, wherein the second polypeptide comprises the Ig Fc polypeptide, and optionally wherein the Ig Fc polypeptide is an IgG1 Fc polypeptide.

6. A T-cell modulatory multimeric polypeptide of claim 5, wherein IgG1 Fc polypeptide comprises one or more amino acid substitutions selected from N297A, L234A, L235A, L234F, L235E, and P331S.

7. A T-cell modulatory multimeric polypeptide of any one of claims 1-6, wherein
a5) the first polypeptide comprises, in order from N-terminus to C-terminus:
i) the peptide epitope;
ii) the first MHC polypeptide; and
iii) the at least one immunomodulatory polypeptide; and
b5) the second polypeptide comprises, in order from N-terminus to C-terminus:
i) the second MHC polypeptide;
ii) the Ig Fc polypeptide; and
iii) the tumor-targeting polypeptide; or
a1) the first polypeptide comprises, in order from N-terminus to C-terminus:
i) the peptide epitope; and
ii) the first MHC polypeptide; and
b1) the second polypeptide comprises, in order from N-terminus to C-terminus:
i) the at least one immunomodulatory polypeptide;
ii) the second MHC polypeptide;
iii) the Ig Fc polypeptide; and
iv) the tumor-targeting polypeptide; or
a6) the first polypeptide comprises, in order from N-terminus to C-terminus:
i) the peptide epitope; and
ii) the first MHC polypeptide;
iii) the at least one immunomodulatory polypeptide and
b6) the second polypeptide comprises, in order from N-terminus to C-terminus:
i) the second MHC polypeptide;
ii) the at least one immunomodulatory polypeptide;
iii) the Ig Fc polypeptide; and
iv) the tumor-targeting polypeptide; or
a7) the first polypeptide comprises, in order from N-terminus to C-terminus:
i) the peptide epitope;
ii) the first MHC polypeptide;
iii) the at least one immunomodulatory polypeptide; and
b7) the second polypeptide comprises, in order from N-terminus to C-terminus:
i) the at least one immunomodulatory polypeptide;
ii) the second MHC polypeptide;
iii) the Ig Fc polypeptide; and
iv) the tumor-targeting polypeptide; or
a4) the first polypeptide comprises, in order from N-terminus to C-terminus:
i) the at least one immunomodulatory polypeptide;
ii) the peptide epitope; and
ii) the first MHC polypeptide; and
b4) a second polypeptide comprises, in order from N-terminus to C-terminus:
i) the second MHC polypeptide;
ii) the Ig Fc polypeptide; and
iii) the tumor-targeting polypeptide; or
a2) the first polypeptide comprises, in order from N-terminus to C-terminus:
i) the peptide epitope; and
ii) the first MHC polypeptide; and
b2) the second polypeptide comprises, in order from N-terminus to C-terminus:
i) the second MHC polypeptide;
ii) the at least one immunomodulatory polypeptide;
iii) the Ig Fc polypeptide; and
iv) the tumor-targeting polypeptide; or
a8) the first polypeptide comprises, in order from N-terminus to C-terminus:
i) the peptide epitope;
ii) the first MHC polypeptide; and
iii) the at least one immunomodulatory polypeptide; and
b8) the second polypeptide comprises, in order from N-terminus to C-terminus:
i) the at least one immunomodulatory polypeptide;
ii) the second MHC polypeptide;
iii) the Ig Fc polypeptide; and
iv) the tumor-targeting polypeptide; or
a9) the first polypeptide comprises, in order from N-terminus to C-terminus:
i) the peptide epitope;
ii) the first MHC polypeptide; and
iii) the at least one immunomodulatory polypeptide; and
b9) the second polypeptide comprises, in order from N-terminus to C-terminus:
i) the second MHC polypeptide;
ii) the at least one immunomodulatory polypeptide;
iii) the Ig Fc polypeptide; and
iv) the tumor-targeting polypeptide; or
a3) the first polypeptide comprises, in order from N-terminus to C-terminus:
i) the peptide epitope; and
ii) the first MHC polypeptide; and
b3) the second polypeptide comprises, in order from N-terminus to C-terminus:
i) the tumor-targeting polypeptide;
ii) the second MHC polypeptide;
iii) the Ig Fc polypeptide; and
iv) the at least one immunomodulatory polypeptide; or
a10) the first polypeptide comprises, in order from N-terminus to C-terminus:
i) the peptide epitope; and
ii) the first MHC polypeptide; and
b10) the second polypeptide comprises, in order from N-terminus to C-terminus:
i) the tumor-targeting polypeptide;
ii) the second MHC polypeptide;
iii) the at least one immunomodulatory polypeptide; and
iv) the Ig Fc polypeptide; or
a11) the first polypeptide comprises, in order from N-terminus to C-terminus:
i) the peptide epitope;
ii) the first MHC polypeptide; and
iii) the tumor-targeting polypeptide; and
b11) the second polypeptide comprises, in order from N-terminus to C-terminus:
i) the at least one immunomodulatory polypeptide;
ii) the second MHC polypeptide; and
iii) the Ig Fc polypeptide; or
a12) the first polypeptide comprises, in order from N-terminus to C-terminus:
i) the peptide epitope;
ii) the first MHC polypeptide; and
iii) the tumor-targeting polypeptide; and
b12) the second polypeptide comprises, in order from N-terminus to C-terminus:
i) the second MHC polypeptide;
ii) the at least one immunomodulatory polypeptide; and
iii) the Ig Fc polypeptide.

8. A T-cell modulatory multimeric polypeptide of any one of claims 1-7, wherein the first polypeptide comprises a peptide linker between the epitope and the first MHC polypeptide and/or wherein the second polypeptide comprises a peptide linker between the immunomodulatory polypeptide and the second MHC polypeptide.

9. A T-cell modulatory multimeric polypeptide of claim 8, wherein the peptide linker comprises the amino acid sequence (GGGGS)n, where n is an integer from 1 to 10.

10. A T-cell modulatory multimeric polypeptide of any one of claims 1-9, wherein the first MHC polypeptide is a β2-microglobulin polypeptide; and wherein the second MHC polypeptide is an MHC class I heavy chain polypeptide.

11. A T-cell modulatory multimeric polypeptide of any one of claims 1-10, wherein the at least one immunomodulatory polypeptide is selected from the group consisting of a cytokine, a 4-1BBL polypeptide, an ICOS-L polypeptide, an OX-40L polypeptide, a CD80 polypeptide, a CD86 polypeptide, a PD-L1 polypeptide, a FasL polypeptide, a PD-L2 polypeptide, and combinations thereof.

12. A T-cell modulatory multimeric polypeptide of any one of claims 1-11, wherein the at least one immunomodulatory polypeptide is an IL-2 polypeptide.

13. A T-cell modulatory multimeric polypeptide of any one of claims 1-12, wherein the multimeric polypeptide comprises at least two immunomodulatory polypeptides, and wherein at least two of the immunomodulatory polypeptides are the same.

14. A T-cell modulatory multimeric polypeptide of claim 13, wherein the 2 or more immunomodulatory polypeptides are in tandem.

15. A T-cell modulatory multimeric polypeptide of any one of claims 1-14, wherein the tumor-targeting polypeptide is an antibody specific for a cancer-associated antigen on the surface of a cancer cell.

16. A T-cell modulatory multimeric polypeptide of claim 15, wherein the antibody is specific for Her2, CD19, WT1, MUC1, BCMA, mesothelin, or a claudin polypeptide.

17. A T-cell modulatory multimeric polypeptide of claim 15 or claim 16, wherein the antibody is a scFv.

18. A T-cell modulatory multimeric polypeptide of claim 15 or claim 16, wherein the antibody is a nanobody.

19. A T-cell modulatory multimeric polypeptide of any one of claims 1-14, wherein the tumor-targeting polypeptide is an antibody specific for a cancer-associated peptide/MHC complex present on the surface of a cancer cell.

20. A T-cell modulatory multimeric polypeptide of any one of claims 1-14, wherein the tumor-targeting polypeptide is single-chain T-cell receptor specific for a cancer-associated antigen on the surface of a cancer cell.

21. A T-cell modulatory multimeric polypeptide of any one of claims 1-20, wherein the first polypeptide and the second polypeptide are covalently linked to one another.

22. A T-cell modulatory multimeric polypeptide of claim 21, wherein the covalent linkage is via a disulfide bond.

23. A T-cell modulatory multimeric polypeptide of claim 22, wherein the β2M polypeptide and the MHC heavy chain polypeptide are joined by a disulfide bond that joins a Cys residue in the β2M polypeptide and a Cys residue in the MHC heavy chain polypeptide.

24. A T-cell modulatory multimeric polypeptide of claim 23, wherein a Cys at amino acid residue 12 of the β2M polypeptide is disulfide bonded to a Cys at amino acid residue 236 of the MHC heavy chain polypeptide.

25. A T-cell modulatory multimeric polypeptide of claim 22, wherein the first polypeptide chain comprises a linker between the peptide epitope and the β2M polypeptide, and wherein the disulfide bond links a Cys present in the linker with a Cys of the MHC heavy chain polypeptide.

26. A T-cell modulatory multimeric polypeptide of claim 22, wherein the first polypeptide chain comprises a linker between the peptide epitope and the β2M polypeptide, and wherein the disulfide bond links a Cys substituted for Gly2 in the linker with a Cys substituted for Tyr84 of the MHC heavy chain polypeptide.

27. A T-cell modulatory multimeric polypeptide of any one of claims 1-26, wherein the first and the second polypeptides are covalently linked to one another via at least 2 disulfide bonds.

28. The T-cell modulatory multimeric polypeptide of claim 27, wherein:
a) a first disulfide bond is between: i) a Cys present in a linker between the peptide epitope and the first MHC class I polypeptide, wherein the first MHC class I polypeptide is a β2M polypeptide; and ii) a Cys residue introduced via a Y84C substitution in the second MHC class I polypeptide, wherein the second MHC class I polypeptide is an MHC Class I heavy chain polypeptide; and
b) a second disulfide bond is between: i) a Cys residue introduced into the β2M polypeptide via an R12C substitution; and ii) a Cys residue introduced into the MHC Class I heavy chain polypeptide via an A236C substitution.

29. A T-cell modulatory multimeric polypeptide of claim 28, wherein the linker comprises the amino acid sequence GCGGS.

30. A T-cell modulatory multimeric polypeptide of claim 29, wherein the linker comprises the amino acid sequence GCGGS(GGGGS)n, where n is an integer from 1 to 10.

31. A T-cell modulatory multimeric polypeptide of any one of claims 1-30, wherein the peptide epitope has a length of from about 4 amino acids to about 25 amino acids (e.g., 4 amino acids (aa), 5 aa, 6 aa, 7 aa, 8 aa, 9 aa, 10 aa, 11 aa, 12 aa, 13 aa, 14 aa, 15 aa, 16 aa, 17 aa, 18 aa, 19 aa, 20 aa, 21 aa, 22 aa, 23 aa, 24 aa, or 25 aa, including within a range of from 4 to 20 aa., from 6 to 18 aa., from 8 to 15 aa, from 8 to 12 aa., from 5 to 10 aa., from 10 to 15 aa., from 15 to 20 aa., from 10 to 20 aa., or from 15 to 25 aa, in length).

32. A T-cell modulatory multimeric polypeptide of any one of claims 1-31, wherein the first or the second MHC polypeptide comprises:
a) an amino acid sequence having at least 95% amino acid sequence identity to the HLA-A*0101, HLA-A*0201, HLA-A*0201, HLA-A*1101, HLA-A*2301, HLA-A*2402, HLA-A*2407, HLA-A*3303, or HLA-A*3401 amino acid sequence depicted in FIG. 7A; or
b) an amino acid sequence having at least 95% amino acid sequence identity to the HLA-B*0702, HLA-B*0801, HLA-B*1502, HLA-B*3802, HLA-B*4001, HLA-B*4601, or HLA-B*5301 amino acid sequence depicted in FIG. 8A; or
c) an amino acid sequence having at least 95% amino acid sequence identity to the HLA-C*0102, HLA-C*0303, HLA-C*0304, HLA-C*0401, HLA-C*0602, HLA-C*0701, HLA-C*0702, HLA-C*0801, or HLA-C*1502 depicted in FIG. 9A.

33. A T-cell modulatory multimeric polypeptide of any one of claims 1-32, wherein the first MHC polypeptide is a β2M polypeptide, and wherein the second MHC polypeptide comprises an amino acid sequence having at least 95% amino acid sequence identity to an HLA-A*2402 polypeptide.

34. A T-cell modulatory multimeric polypeptide of any one of claims 1-32, wherein the first MHC polypeptide is a β2M polypeptide, and wherein the second MHC polypeptide is an HLA-A*1101 polypeptide.

35. A T-cell modulatory multimeric polypeptide of any one of claims 1-32, wherein the first MHC polypeptide is a β2M polypeptide, and wherein the second MHC polypeptide comprises an amino acid sequence having at least 95% amino acid sequence identity to an HLA-A*3303 polypeptide.

36. A T-cell modulatory multimeric polypeptide of any one of claims 1-32, wherein the first MHC polypeptide is a β2M polypeptide, and wherein the second MHC polypeptide comprises an amino acid sequence having at least 95% amino acid sequence identity to an HLA-A*0201 polypeptide.

37. A T-cell modulatory multimeric polypeptide of any one of claims 1-36, wherein the immunomodulatory polypeptide is a variant IL-2 polypeptide comprising: i) an H16A substitution and an F42A substitution; or ii) an H16T substitution and an F42A substitution.

38. A T-cell modulatory multimeric polypeptide of any one of claims 1-37, wherein the epitope is a cancer-associated epitope.

39. A T-cell modulatory multimeric polypeptide of any one of claims 1-37, wherein the epitope is a peptide of a viral antigen.

40. A T-cell modulatory multimeric polypeptide of claim 39, where the viral antigen is a cytomegalovirus (CMV) polypeptide.

41. A T-cell modulatory multimeric polypeptide of claim 40, wherein the CMV polypeptide is a CMV pp65 polypeptide.

42. A T-cell modulatory multimeric polypeptide of claim 41, wherein the peptide has the amino acid sequence NLVPMVATV and has a length of 9 amino acids.

43. A T-cell modulatory multimeric polypeptide of any one of claims 1-42, wherein the multimeric polypeptide comprises a first and a second heterodimer, and
wherein the first and second heterodimers are covalently bound by one or more disulfide bonds between the Ig Fc polypeptides of the first and second heterodimers.

44. A nucleic acid comprising a nucleotide sequence encoding a first or second polypeptide according to any one of claims 1-43, wherein the first or second polypeptide comprises at least one immunomodulatory polypeptide.

45. An expression vector comprising the nucleic acid of claim 44.

46. A method of selectively modulating the activity of T cell specific for an epitope, the method comprising contacting the T cell with a T-cell modulatory multimeric polypeptide according to any one of claims 1-43, wherein said contacting selectively modulates the activity of the epitope-specific T cell.

47. A method of treating a patient having a cancer, the method comprising administering to the patient an effective amount of a pharmaceutical composition comprising T-cell modulatory multimeric polypeptide according to any one of claims 1-43.

48. The method of claim 47, wherein the cancer is a carcinoma, sarcoma, melanoma, leukemia, or lymphoma.

49. The method of claim 47 or 48, wherein said administering is intramuscular, intravenous, peritumoral, or intratumoral.

50. A method of modulating an immune response in an individual, the method comprising administering to the individual an effective amount of the T-cell modulatory multimeric polypeptide of any one of claims 1-43,
wherein said administering induces an epitope-specific T cell response and an epitope-non-specific T cell response,
wherein the ratio of the epitope-specific T cell response to the epitope-non-specific T cell response is at least 2:1.

The application's sequence listing, which the Patent Office published only in electronic form, follows.

SEQUENCE LISTING (572 sequences)

SEQ ID NO: 1 - protein, 245 aa, Homo sapiens
MRIFAVFIFMTYWHLLNAFTVTVPKDLYVVEYGSNMTIECKFPVEKQLDLAALIVYWEMEDKNIIQFVHGEEDLKVQHSSYRQRARLLKDQLSLGNAALQITDVKLQDAGVYRCMISYGGADYKRITVKVNAPYNKINQRILVVDPVTSEHELTCQAEGYPKAEVIWTSSDHQVLSGKTTTTNSKREEKLFNVTSTLRINTTTNEIFYCTFRRLDPEENHTAELVIPGNILNVSIKICLTLSPST

SEQ ID NO: 2 - protein, 219 aa, Homo sapiens
FTVTVPKDLYVVEYGSNMTIECKFPVEKQLDLAALIVYWEMEDKNIIQFVHGEEDLKVQHSSYRQRARLLKDQLSLGNAALQITDVKLQDAGVYRCMISYGGADYKRITVKVNAPYNKINQRILVVDPVTSEHELTCQAEGYPKAEVIWTSSDHQVLSGKTTTTNSKREEKLFNVTSTLRINTTTNEIFYCTFRRLDPEENHTAELVIPGNILNVSIKI

SEQ ID NO: 3 - protein, 268 aa, Homo sapiens
PGWFLDSPDRPWNPPTFSPALLVVTEGDNATFTCSFSNTSESFVLNWYRMSPSNQTDKLAAFPEDRSQPGQDCRFRVTQLPNGRDFHMSVVRARRNDSGTYLCGAISLAPKAQIKESLRAELRVTERRAEVPTAHPSPSPRPAGQFQTLVVGVVGGLLGSLVLLVWVLAVICSRAARGTIGARRTGQPLKEDPSAVPVFSVDYGELDFQWREKTPEPPVPCVPEQTEYATIVFPSGMGTSSPARRGSADGPRSAQPLRPEDGHCSWPL

SEQ ID NO: 4 - protein, 208 aa, Homo sapiens [sequence omitted]

SEQ ID NO: 5 - protein, 220 aa, Homo sapiens
MLRLLLALNLFPSIQVTGNKILVKQSPMLVAYDNAVNLSCKYSYNLFSREFRASLHKGLDSAVEVCVVYGNYSQQLQVYSKTGFNCDGKLGNESVTFYLQNLYVNQTDIYFCKIEVMYPPPYLDNEKSNGTIIHVKGKHLCPSPLFPGPSKPFWVLVVVGGVLACYSLLVTVAFIIFWVRSKRSRLLHSDYMNMTPRRPGPTRKHYQPYAPPRDFAAYRS

SEQ ID NO: 6 - protein, 113 aa, Homo sapiens
FPSIQVTGNKILVKQSPMLVAYDNAVNLSWKHLCPSPLFPGPSKPFWVLVVVGGVLACYSLLVTVAFIIFWVRSKRSRLLHSDYMNMTPRRPGPTRKHYQPYAPPRDFAAYRS

SEQ ID NO: 7 - protein, 101 aa, Homo sapiens
MLRLLLALNLFPSIQVTGKHLCPSPLFPGPSKPFWVLVVVGGVLACYSLLVTVAFIIFWVRSKRSRLLHSDYMNMTPRRPGPTRKHYQPYAPPRDFAAYRS

SEQ ID NO: 8 - protein, 224 aa, Homo sapiens
APLKIQAYFNETADLPCQFANSQNQSLSELVVFWQDQENLVLNEVYLGKEKFDSVHSKYMNRTSFDSDSWTLRLHNLQIKDKGLYQCIIHHKKPTGMIRIHQMNSELSVLANFSQPEIVPISNITENVYINLTCSSIHGYPEPKKMSVLLRTKNSTIEYDGIMQKSQDNVTELYDVSISLSVSFPDVTSNMTIFCILETDKTRLLSSPFSIELEDPQPPPDHIP

SEQ ID NO: 9 - protein, 110 aa, Homo sapiens
APLKIQAYFNETADLPCQFANSQNQSLSELVVFWQDQENLVLNEVYLGKEKFDSVHSKYMNRTSFDSDSWTLRLHNLQIKDKGLYQCIIHHKKPTGMIRIHQMNSELSVL

SEQ ID NO: 10 - protein, 254 aa, Homo sapiens
MEYASDASLDPEAPWPPAPRARACRVLPWALVAGLLLLLLLAAACAVFLACPWAVSGARASPGSAASPRLREGPELSPDDPAGLLDLRQGMFAQLVAQNVLLIDGPLSWYSDPGLAGVSLTGGLSYKEDTKELVVAKAGVYYVFFQLELRRVVAGEGSGSVSLALHLQPLRSAAGAAALALTVDLPPASSEARNSAFGFQGRLLHLSAGQRLGVHLHTEARARHAWQLTQGATVLGLFRVTPEIPAGLPSPRSE

SEQ ID NO: 11 - protein, 174 aa, Homo sapiens
PAGLLDLRQGMFAQLVAQNVLLIDGPLSWYSDPGLAGVSLTGGLSYKEDTKELVVAKAGVYYVFFQLELRRVVAGEGSGSVSLALHLQPLRSAAGAAALALTVDLPPASSEARNSAFGFQGRLLHLSAGQRLGVHLHTEARARHAWQLTQGATVLGLFRVTPEIPAGLPSPRSE

SEQ ID NO: 12 - protein, 175 aa, Homo sapiens
DPAGLLDLRQGMFAQLVAQNVLLIDGPLSWYSDPGLAGVSLTGGLSYKEDTKELVVAKAGVYYVFFQLELRRVVAGEGSGSVSLALHLQPLRSAAGAAALALTVDLPPASSEARNSAFGFQGRLLHLSAGQRLGVHLHTEARARHAWQLTQGATVLGLFRVTPEIPAGLPSPRSE

SEQ ID NO: 13 - protein, 167 aa, Homo sapiens
DPAGLLDLRQGMFAQLVAQNVLLIDGPLSWYSDPGLAGVSLTGGLSYKEDTKELVVAKAGVYYVFFQLELRRVVAGEGSGSVSLALHLQPLRSAAGAAALALTVDLPPASSEARNSAFGFQGRLLHLSAGQRLGVHLHTEARARHAWQLTQGATVLGLFRVTPEIPA

SEQ ID NO: 14 - protein, 255 aa, Homo sapiens
MGNSCYNIVATLLLVLNFERTRSLQDPCSNCPAGTFCDNNRNQICSPCPPNSFSSAGGQRTCDICRQCKGVFRTRKECSSTSNAECDCTPGFHCLGAGCSMCEQDCKQGQELTKKGCKDCCFGTFNDQKRGICRPWTNCSLDGKSVLVNGTKERDVVCGPSPADLSPGASSVTPPAPAREPGHSPQIISFFLALTSTALLFLLFFLTLRFSVVKRGRKKLLYIFKQPFMRPVQTTQEEDGCSCRFPEEEEGGCEL

SEQ ID NO: 15 - protein, 133 aa, Homo sapiens [sequence omitted]

SEQ ID NO: 16 - protein, 251 aa, Homo sapiens
ELCDDDPPEIPHATFKAMAYKEGTMLNCECKRGFRRIKSGSLYMLCTGNSSHSSWDNQCQCTSSATRNTTKQVTPQPEEQKERKTTEMQSPMQPVDQASLPGHCREPPPWENEATERIYHFVVGQMVYYQCVQGYRALHRGPAESVCKMTHGKTRWTQPQLICTGEMETSQFPGEEKPQASPEGRPESETSCLVTTTDFQIQTEMAATMETSIFTTEYQVAVAGCVFLLISVLLLSGLTWQRRQRKSRRTI

SEQ ID NO: 17 - protein, 524 aa, Homo sapiens
VNGTSQFTCFYNSRANISCVWSQDGALQDTSCQVHAWPDRRRWNQTCELLPVSQASWACNLILGAPDSQKLTTVDIVTLRVLCREGVRWRVMAIQDFKPFENLRLMAPISLQVVHVETHRCNISWEISQASHYFERHLEFEARTLSPGHTWEEAPLLTLKQKQEWICLETLTPDTQYEFQVRVKPLQGEFTTWSPWSQPLAFRTKPAALGKDTIPWLGHLLVGLSGAFGFIILVYLLINCRNTGPWLKKVLKCNTPDPSKFFSQLSSEHGGDVQKWLSSPFPSSSFSPGGLAPEISPLEVLERDKVTQLLLQQDKVPEPASLSSNHSLTSCFTNQGYFFFHLPDALEIEACQVYFTYDPYSEEDPDEGVAGAPTGSSPQPLQPLSGEDDAYCTFPSRDDLLLFSPSLLGGPSPPSTAPGGSGAGEERMPPSLQERVPRDWDPQPLGPPTPGVPDLVDFQPPPELVLREAGEEVPDAGPREGVSFPWSRPPGQGEFRALNARLPLNTDAYLSLQELQGQDPTHLV

SEQ ID NO: 18 - protein, 347 aa, Homo sapiens
LNTTILTPNGNEDTTADFFLTTMPTDSLSVSTLPLPEVQCFVFNVEYMNCTWNSSSEPQPTNLTLHYWYKNSDNDKVQKCSHYLFSEEITSGCQLQKKEIHLYQTFVVQLQDPREPRRQATQMLKLQNLVIPWAPENLTLHKLSESQLELNWNNRFLNHCLEHLVQYRTDWDHSWTEQSVDYRHKFSLPSVDGQKRYTFRVRSRFNPLCGSAQHWSEWSHPIHWGSNTSKENPFLFALEAVVISVGSMGLIISLLCVYFWLERTMPRIPTLKNLEDLVTEYHGNFSAWSGVSKGLAESLQPDYSERLCLVSEIPPKGGALGEGPGASPCNQHSPYWAPPCYTLKPET

SEQ ID NO: 19 - protein, 227 aa, Artificial sequence
  synthetic sequence
DKTHTCPPCPAPELLGGPSVFLFPPKPKDTLMISRTPEVTCVVVDVSHEDPEVKFNWYVDGVEVHNAKTKPREEQYNSTYRVVSVLTVLHQDWLNGKEYKCKVSNKALPAPIEKTISKAKGQPREPQVYTLPPSRDELTKNQVSLTCLVKGFYPSDIAVEWESNGQPENNYKTTPPVLDSDGSFFLYSKLTVDKSRWQQGNVFSCSVMHEALHNHYTQKSLSLSPGK

SEQ ID NO: 20 - protein, 325 aa, Artificial sequence
  synthetic sequence
STKGPSVFPLAPCSRSTSESTAALGCLVKDYFPEPVTVSWNSGALTSGVHTFPAVLQSSGLYSLSSVVTVPSSNFGTQTYTCNVDHKPSNTKVDKTVERKCCVECPPCPAPPVAGPSVFLFPPKPKDTLMISRTPEVTCVVVDVSHEDPEVQFNWYVDGVEVHNAKTKPREEQFNSTFRVVSVLTVVHQDWLNGKEYKCKVSNKGLPAPIEKTISKTKGQPREPQVYTLPPSREEMTKNQVSLTCLVKGFYPSDIAVEWESNGQPENNYKTTPPMLDSDGSFFLYSKLTVDKSRWQQGNVFSCSVMHEALHNHYTQKSLSLSPGK

SEQ ID NO: 21 - protein, 246 aa, Artificial sequence
  synthetic sequence
HKPSNTKVDKRVELKTPLGDTTHTCPPCPAPELLGGPSVFLFPPKPKDTLMISRTPEVTCVVVDVSHEDPEVKFNWYVDGVEVHNAKTKPREEQYNSTYRVVSVLTVLHQDWLNGKEYKCKVSNKALPAPIEKTISKAKGQPREPQVYTLPPSRDELTKNQVSLTCLVKGFYPSDIAVEWESNGQPENNYKTTPPVLDSDGSFFLYSKLTVDKSRWQQGNVFSCSVMHEALHNHYTQKSLSLSPGK

SEQ ID NO: 22 - protein, 383 aa, Artificial sequence
  synthetic sequence
PTKAPDVFPIISGCRHPKDNSPVVLACLITGYHPTSVTVTWYMGTQSQPQRTFPEIQRRDSYYMTSSQLSTPLQQWRQGEYKCVVQHTASKSKKEIFRWPESPKAQASSVPTAQPQAEGSLAKATTAPATTRNTGRGGEEKKKEKEKEEQEERETKTPECPSHTQPLGVYLLTPAVQDLWLRDKATFTCFVVGSDLKDAHLTWEVAGKVPTGGVEEGLLERHSNGSQSQHSRLTLPRSLWNAGTSVTCTLNHPSLPPQRLMALREPAAQAPVKLSLNLLASSDPPEAASWLLCEVSGFSPPNILLMWLEDQREVNTSGFAPARPPPQPRSTTFWAWSVLRVPAPPSPQPATYTCVVSHEDSRTLLNASRSLEVSYVTDHGPMK

SEQ ID NO: 23 - protein, 276 aa, Artificial sequence
  synthetic sequence
VTSTLTIKZSDWLGESMFTCRVDHRGLTFQQNASSMCVPDQDTAIRVFAIPPSFASIFLTKSTKLTCLVTDLTTYBSVTISWTREENGAVKTHTNISESHPNATFSAVGEASICEDBDWSGERFTCTVTHTDLPSPLKQTISRPKGVALHRPBVYLLPPARZZLNLRESATITCLVTGFSPADVFVEWMQRGEPLSPQKYVTSAPMPEPQAPGRYFAHSILTVSEEEWNTGGTYTCVVAHEALPNRVTERTVDKSTGKPTLYNVSLVMSDTAGTCY

SEQ ID NO: 24 - protein, 353 aa, Artificial sequence
  synthetic sequence
ASPTSPKVFPLSLCSTQPDGNVVIACLVQGFFPQEPLSVTWSESGQGVTARNFPPSQDASGDLYTTSSQLTLPATQCLAGKSVTCHVKHYTNPSQDVTVPCPVPSTPPTPSPSTPPTPSPSCCHPRLSLHRPALEDLLLGSEANLTCTLTGLRDASGVTFTWTPSSGKSAVQGPPERDLCGCYSVSSVLPGCAEPWNHGKTFTCTAAYPESKTPLTATLSKSGNTFRPEVHLLPPPSEELALNELVTLTCLARGFSPKDVLVRWLQGSQELPREKYLTWASRQEPSQGTTTFAVTSILRVAAEDWKKGDTFSCMVGHEALPLAFTQKTIDRLAGKPTHVNVSVVMAEVDGTCY

SEQ ID NO: 25 - protein, 222 aa, Artificial sequence
  synthetic sequence
ADPCDSNPRGVSAYLSRPSPFDLFIRKSPTITCLVVDLAPSKGTVNLTWSRASGKPVNHSTRKEEKQRNGTLTVTSTLPVGTRDWIEGETYQCRVTHPHLPRALMRSTTKTSGPRAAPEVYAFATPEWPGSRDKRTLACLIQNFMPEDISVQWLHNEVQLPDARHSTTQPRKTKGSGFFVFSRLEVTRAEWEQKDEFICRAVHEAASPSQTVQRAVSVNPGK

SEQ ID NO: 26 - protein, 327 aa, Artificial sequence
  synthetic sequence
ASTKGPSVFPLAPCSRSTSESTAALGCLVKDYFPEPVTVSWNSGALTSGVHTFPAVLQSSGLYSLSSVVTVPSSSLGTKTYTCNVDHKPSNTKVDKRVESKYGPPCPSCPAPEFLGGPSVFLFPPKPKDTLMISRTPEVTCVVVDVSQEDPEVQFNWYVDGVEVHNAKTKPREEQFNSTYRVVSVLTVLHQDWLNGKEYKCKVSNKGLPSSIEKTISKAKGQPREPQVYTLPPSQEEMTKNQVSLTCLVKGFYPSDIAVEWESNGQPENNYKTTPPVLDSDGSFFLYSRLTVDKSRWQEGNVFSCSVMHEALHNHYTQKSLSLSLGK

SEQ ID NO: 27 - protein, 227 aa, Artificial sequence
  synthetic sequence
DKTHTCPPCPAPELLGGPSVFLFPPKPKDTLMISRTPEVTCVVVDVSHEDPEVKFNWYVDGVEVHNAKTKPREEQYNSTYRVVSVLTVLHQDWLNGKEYKCKVSNKALPAPIEKTISKAKGQPREPQVYTLPPSREEMTKNQVSLTCLVKGFYPSDIAVEWESNGQPENNYKTTPPVLDSDGSFFLYSKLTVDKSRWQQGNVFSCSVMHEALHNHYTQKSLSLSPGK

SEQ ID NO: 28 - protein, 227 aa, Artificial sequence
  synthetic sequence
DKTHTCPPCPAPEFEGGPSVFLFPPKPKDTLMISRTPEVTCVVVDVSHEDPEVKFNWYVDGVEVHNAKTKPREEQYNSTYRVVSVLTVLHQDWLNGKEYKCKVSNKALPASIEKTISKAKGQPREPQVYTLPPSREEMTKNQVSLTCLVKGFYPSDIAVEWESNGQPENNYKTTPPVLDSDGSFFLYSKLTVDKSRWQQGNVFSCSVMHEALHNHYTQKSLSLSPGK

SEQ ID NO: 29 - protein, 227 aa, Artificial sequence
  synthetic sequence
DKTHTCPPCPAPELLGGPSVFLFPPKPKDTLMISRTPEVTCVVVDVSHEDPEVKFNWYVDGVEVHNAKTKPREEQYASTYRVVSVLTVLHQDWLNGKEYKCKVSNKALPAPIEKTISKAKGQPREPQVYTLPPSREEMTKNQVSLTCLVKGFYPSDIAVEWESNGQPENNYKTTPPVLDSDGSFFLYSKLTVDKSRWQQGNVFSCSVMHEALHNHYTQKSLSLSPGK

SEQ ID NO: 30 - protein, 227 aa, Artificial sequence
  synthetic sequence
DKTHTCPPCPAPEAAGGPSVFLFPPKPKDTLMISRTPEVTCVVVDVSHEDPEVKFNWYVDGVEVHNAKTKPREEQYNSTYRVVSVLTVLHQDWLNGKEYKCKVSNKALPAPIEKTISKAKGQPREPQVYTLPPSREEMTKNQVSLTCLVKGFYPSDIAVEWESNGQPENNYKTTPPVLDSDGSFFLYSKLTVDKSRWQQGNVFSCSVMHEALHNHYTQKSLSLSPGK

SEQ ID NO: 31 - protein, 119 aa, Homo sapiens
MSRSVALAVLALLSLSGLEAIQRTPKIQVYSRHPAENGKSNFLNCYVSGFHPSDIEVDLLKNGERIEKVEHSDLSFSKDWSFYLLYYTEFTPTEKDEYACRVNHVTLSQPKIVKWDRDM

SEQ ID NO: 32 - protein, 119 aa, Macaca mulatta
MSRSVALAVLALLSLSGLEAIQRTPKIQVYSRHPPENGKPNFLNCYVSGFHPSDIEVDLLKNGEKMGKVEHSDLSFSKDWSFYLLYYTEFTPNEKDEYACRVNHVTLSGPRTVKWDRDM

SEQ ID NO: 33 - protein, 118 aa, Bos Taurus
MARFVALVLLGLLSLSGLDAIQRPPKIQVYSRHPPEDGKPNYLNCYVYGFHPPQIEIDLLKNGEKIKSEQSDLSFSKDWSFYLLSHAEFTPNSKDQYSCRVKHVTLEQPRIVKWDRDL

SEQ ID NO: 34 - protein, 119 aa, Mus musculus
MARSVTLVFLVLVSLTGLYAIQKTPQIQVYSRHPPENGKPNILNCYVTQFHPPHIEIQMLKNGKKIPKVEMSDMSFSKDWSFYILAHTEFTPTETDTYACRVKHASMAEPKTVYWDRDM

SEQ ID NO: 35 - protein, 365 aa, Homo sapiens
MAVMAPRTLLLLLSGALALTQTWAGSHSMRYFFTSVSRPGRGEPRFIAVGYVDDTQFVRFDSDAASQKMEPRAPWIEQEGPEYWDQETRNMKAHSQTDRANLGTLRGYYNQSEDGSHTIQIMYGCDVGPDGRFLRGYRQDAYDGKDYIALNEDLRSWTAADMAAQITKRKWEAVHAAEQRRVYLEGRCVDGLRRYLENGKETLQRTDPPKTHMTHHPISDHEATLRCWALGFYPAEITLTWQRDGEDQTQDTELVETRPAGDGTFQKWAAVVVPSGEEQRYTCHVQHEGLPKPLTLRWELSSQPTIPIVGIIAGLVLLGAVITGAVVAAVMWRRKSSDRKGGSYTQAASSDSAQGSDVSLTACKV

SEQ ID NO: 36 - protein, 365 aa, Homo sapiens
MAVMAPRTLLLLLSGALALTQTWAGSHSMRYFYTSVSRPGRGEPRFIAVGYVDDTQFVRFDSDAASQRMEPRAPWIEQEGPEYWDQETRNVKAQSQTDRVDLGTLRGYYNQSEDGSHTIQIMYGCDVGPDGRFLRGYRQDAYDGKDYIALNEDLRSWTAADMAAQITKRKWEAAHAAEQQRAYLEGRCVEWLRRYLENGKETLQRTDPPKTHMTHHPISDHEATLRCWALGFYPAEITLTWQRDGEDQTQDTELVETRPAGDGTFQKWAAVVVPSGEEQRYTCHVQHEGLPKPLTLRWELSSQPTIPIVGIIAGLVLLGAVITGAVVAAVMWRRKSSDRKGGSYTQAASSDSAQGSDVSLTACKV

SEQ ID NO: 37 - protein, 365 aa, Homo sapiens [sequence omitted]

SEQ ID NO: 38 - protein, 365 aa, Homo sapiens [sequence omitted]

SEQ ID NO: 39 - protein, 362 aa, Homo sapiens
MLVMAPRTVLLLLSAALALTETWAGSHSMRYFYTSVSRPGRGEPRFISVGYVDDTQFVRFDSDAASPREEPRAPWIEQEGPEYWDRNTQIYKAQAQTDRESLRNLRGYYNQSEAGSHTLQSMYGCDVGPDGRLLRGHDQYAYDGKDYIALNEDLRSWTAADTAAQITQRKWEAAREAEQRRAYLEGECVEWLRRYLENGKDKLERADPPKTHVTHHPISDHEATLRCWALGFYPAEITLTWQRDGEDQTQDTELVETRPAGDRTFQKWAAVVVPSGEEQRYTCHVQHEGLPKPLTLRWEPSSQSTVPIVGIVAGLAVLAVVVIGAVVAAVMCRRKSSGGKGGSYSQAACSDSAQGSDVSLTA

SEQ ID NO: 40 - protein, 366 aa, Homo sapiens
MRVMAPRALLLLLSGGLALTETWACSHSMRYFDTAVSRPGRGEPRFISVGYVDDTQFVRFDSDAASPRGEPRAPWVEQEGPEYWDRETQNYKRQAQADRVSLRNLRGYYNQSEDGSHTLQRMYGCDLGPDGRLLRGYDQSAYDGKDYIALNEDLRSWTAADTAAQITQRKLEAARAAEQLRAYLEGTCVEWLRRYLENGKETLQRAEPPKTHVTHHPLSDHEATLRCWALGFYPAEITLTWQRDGEDQTQDTELVETRPAGDGTFQKWAAVVVPSGQEQRYTCHMQHEGLQEPLTLSWEPSSQPTIPIMGIVAGLAVLVVLAVLGAVVTAMMCRRKSSGGKGGSCSQAACSNSAQGSDESLITCKA

SEQ ID NO: 41 - protein, 275 aa, Homo sapiens
GSHSMRYFFTSVSRPGRGEPRFIAVGYVDDTQFVRFDSDAASQKMEPRAPWIEQEGPEYWDQETRNMKAHSQTDRANLGTLRGYYNQSEDGSHTIQIMYGCDVGPDGRFLRGYRQDAYDGKDYIALNEDLRSWTAADMAAQITKRKWEAVHAAEQRRVYLEGRCVDGLRRYLENGKETLQRTDPPKTHMTHHPISDHEATLRCWALGFYPAEITLTWQRDGEDQTQDTELVETRPAGDGTFQKWAAVVVPSGEEQRYTCHVQHEGLPKPLTLRWE

SEQ ID NO: 42 - protein, 275 aa, Homo sapiens
GSHSMRYFYTSVSRPGRGEPRFISVGYVDDTQFVRFDSDAASPREEPRAPWIEQEGPEYWDRNTQIYKAQAQTDRESLRNLRGYYNQSEAGSHTLQSMYGCDVGPDGRLLRGHDQYAYDGKDYIALNEDLRSWTAADTAAQITQRKWEAAREAEQRRAYLEGECVEWLRRYLENGKDKLERADPPKTHVTHHPISDHEATLRCWALGFYPAEITLTWQRDGEDQTQDTELVETRPAGDRTFQKWAAVVVPSGEEQRYTCHVQHEGLPKPLTLRWE

SEQ ID NO: 43 - protein, 275 aa, Homo sapiens
CSHSMRYFDTAVSRPGRGEPRFISVGYVDDTQFVRFDSDAASPRGEPRAPWVEQEGPEYWDRETQNYKRQAQADRVSLRNLRGYYNQSEDGSHTLQRMYGCDLGPDGRLLRGYDQSAYDGKDYIALNEDLRSWTAADTAAQITQRKLEAARAAEQLRAYLEGTCVEWLRRYLENGKETLQRAEPPKTHVTHHPLSDHEATLRCWALGFYPAEITLTWQRDGEDQTQDTELVETRPAGDGTFQKWAAVVVPSGQEQRYTCHMQHEGLQEPLTLSWE

SEQ ID NO: 44 - protein, 276 aa, Homo sapiens [sequence omitted]

SEQ ID NO: 45 - protein, 274 aa, Mus musculus
GPHSLRYFVTAVSRPGLGEPRFIAVGYVDDTQFVRFDSDADNPRFEPRAPWMEQEGPEYWEEQTQRAKSDEQWFRVSLRTAQRYYNQSKGGSHTFQRMFGCDVGSDWRLLRGYQQFAYDGRDYIALNEDLKTWTAADTAALITRRKWEQAGDAEYYRAYLEGECVEWLRRYLELGNETLLRTDSPKAHVTYHPRSQVDVTLRCWALGFYPADITLTWQLNGEDLTQDMELVETRPAGDGTFQKWAAVVVPLGKEQNYTCHVHHKGLPEPLTLRW

SEQ ID NO: 46 - protein, 275 aa, Artificial sequence
  synthetic sequence
GSHSMRYFFTSVSRPGRGEPRFIAVGYVDDTQFVRFDSDAASQRMEPRAPWIEQEGPEYWDGETRKVKAHSQTHRVDLGTLRGAYNQSEAGSHTVQRMYGCDVGSDWRFLRGYHQYAYDGKDYIALKEDLRSWTAADMAAQTTKHKWEAAHVAEQLRAYLEGTCVEWLRRYLENGKETLQRTDAPKTHMTHHAVSDHEATLRCWALSFYPAEITLTWQRDGEDQTQDTELVETRPCGDGTFQKWAAVVVPSGQEQRYTCHVQHEGLPKPLTLRWE

SEQ ID NO: 47 - protein, 275 aa, Artificial sequence
  synthetic sequence
GSHSMRYFFTSVSRPGRGEPRFIAVGYVDDTQFVRFDSDAASQRMEPRAPWIEQEGPEYWDGETRKVKAHSQTHRVDLGTLRGCYNQSEAGSHTVQRMYGCDVGSDWRFLRGYHQYAYDGKDYIALKEDLRSWTAADMCAQTTKHKWEAAHVAEQLRAYLEGTCVEWLRRYLENGKETLQRTDAPKTHMTHHAVSDHEATLRCWALSFYPAEITLTWQRDGEDQTQDTELVETRPCGDGTFQKWAAVVVPSGQEQRYTCHVQHEGLPKPLTLRWE

SEQ ID NO: 48 - protein, 276 aa, Artificial sequence
  synthetic sequence
GSHSMRYFFTSVSRPGRGEPRFIAVGYVDDTQFVRFDSDAASQRMEPRAPWIEQEGPEYWDGETRKVKAHSQTHRVDLGTLRGAYNQSEAGSHTVQRMYGCDVGSDWRFLRGYHQYAYDGKDYIALKEDLRSWTAADMAAQTTKHKWEAAHVAEQLRAYLEGTCVEWLRRYLENGKETLQRTDAPKTHMTHHAVSDHEATLRCWALSFYPAEITLTWQRDGEDQTQDTELVETRPCGDGTFQKWAAVVVPSGQEQRYTCHVQHEGLPKPLTLRWEP

SEQ ID NO: 49 - protein, 276 aa, Homo sapiens
GSHSMRYFYTSVSRPGRGEPRFIAVGYVDDTQFVRFDSDAASQRMEPRAPWIEQEGPEYWDQETRNVKAQSQTDRVDLGTLRGYYNQSEDGSHTIQIMYGCDVGPDGRFLRGYRQDAYDGKDYIALNEDLRSWTAADMAAQITKRKWEAAHAAEQQRAYLEGRCVEWLRRYLENGKETLQRTDPPKTHMTHHPISDHEATLRCWALGFYPAEITLTWQRDGEDQTQDTELVETRPAGDGTFQKWAAVVVPSGEEQRYTCHVQHEGLPKPLTLRWEL

SEQ ID NO: 50 - protein, 276 aa, Homo sapiens
GSHSMRYFSTSVSRPGRGEPRFIAVGYVDDTQFVRFDSDAASQRMEPRAPWIEQEGPEYWDEETGKVKAHSQTDRENLRIALRYYNQSEAGSHTLQMMFGCDVGSDGRFLRGYHQYAYDGKDYIALKEDLRSWTAADMAAQITKRKWEAAHVAEQQRAYLEGTCVDGLRRYLENGKETLQRTDPPKTHMTHHPISDHEATLRCWALGFYPAEITLTWQRDGEDQTQDTELVETRPAGDGTFQKWAAVVVPSGEEQRYTCHVQHEGLPKPLTLRWEP

SEQ ID NO: 51 - protein, 276 aa, Homo sapiens
GSHSMRYFTTSVSRPGRGEPRFIAVGYVDDTQFVRFDSDAASQRMEPRAPWIEQEGPEYWDRNTRNVKAHSQIDRVDLGTLRGYYNQSEAGSHTIQMMYGCDVGSDGRFLRGYQQDAYDGKDYIALNEDLRSWTAADMAAQITQRKWEAARVAEQLRAYLEGTCVEWLRRYLENGKETLQRTDPPKTHMTHHAVSDHEATLRCWALSFYPAEITLTWQRDGEDQTQDTELVETRPAGDGTFQKWASVVVPSGQEQRYTCHVQHEGLPKPLTLRWEP

SEQ ID NO: 52 - protein, 276 aa, Artificial sequence
  synthetic sequence
GSHSMRYFFTSVSRPGRGEPRFIAVGYVDDTQFVRFDSDAASQKMEPRAPWIEQEGPEYWDQETRNMKAHSQTDRANLGTLRGYYNQSEDGSHTIQIMYGCDVGPDGRFLRGYRQDAYDGKDYIALNEDLRSWTAADMAAQITKRKWEAVHAAEQRRVYLEGRCVDGLRRYLENGKETLQRTDPPKTHMTHHPISDHEATLRCWALGFYPAEITLTWQRDGEDQTQDTELVETRPAGDGTFQKWAAVVVPSGEEQRYTCHVQHEGLPKPLTLRWEL

SEQ ID NO: 53 - protein, 276 aa, Artificial sequence [sequence omitted]

SEQ ID NO: 54 - protein, 276 aa, Artificial sequence
  synthetic sequence
GSHSMRYFFTSVSRPGRGEPRFIAVGYVDDTQFVRFDSDAASQRMEPRAPWIEQEGPEYWDQETRNVKAQSQTDRVDLGTLRGYYNQSEAGSHTIQIMYGCDVGSDGRFLRGYRQDAYDGKDYIALNEDLRSWTAADMAAQITKRKWEAAHEAEQLRAYLDGTCVEWLRRYLENGKETLQRTDPPKTHMTHHPISDHEATLRCWALGFYPAEITLTWQRDGEDQTQDTELVETRPAGDGTFQKWAAVVVPSGEEQRYTCHVQHEGLPKPLTLRWEL

SEQ ID NO: 55 - protein, 276 aa, Artificial sequence; identical to SEQ ID NO: 49
  synthetic sequence

SEQ ID NO: 56 - protein, 276 aa, Artificial sequence
  synthetic sequence
GSHSMRYFSTSVSRPGRGEPRFIAVGYVDDTQFVRFDSDAASQRMEPRAPWIEQEGPEYWDEETGKVKAHSQTDRENLRIALRYYNQSEAGSHTLQMMFGCDVGSDGRFLRGYHQYAYDGKDYIALKEDLRSWTAADMAAQITQRKWEAARVAEQLRAYLEGTCVDGLRRYLENGKETLQRTDPPKTHMTHHPISDHEATLRCWALGFYPAEITLTWQRDGEDQTQDTELVETRPAGDGTFQKWAAVVVPSGEEQRYTCHVQHEGLPKPLTLRWEP

SEQ ID NO: 57 - protein, 276 aa, Artificial sequence; identical to SEQ ID NO: 50
  synthetic sequence

SEQ ID NO: 58 - protein, 276 aa, Artificial sequence
  synthetic sequence
GSHSMRYFSTSVSRPGRGEPRFIAVGYVDDTQFVRFDSDAASQRMEPRAPWIEQEGPEYWDEETGKVKAQSQTDRENLRIALRYYNQSEAGSHTLQMMFGCDVGSDGRFLRGYHQYAYDGKDYIALKEDLRSWTAADMAAQITKRKWEAAHVAEQQRAYLEGTCVDGLRRYLENGKETLQRTDPPKTHMTHHPISDHEATLRCWALGFYPAEITLTWQRDGEDQTQDTELVETRPAGDGTFQKWAAVVVPSGEEQRYTCHVQHEGLPKPLTLRWEP

SEQ ID NO: 59 - protein, 276 aa, Artificial sequence; identical to SEQ ID NO: 51
  synthetic sequence

SEQ ID NO: 60 - protein, 276 aa, Artificial sequence
  synthetic sequence
GSHSMRYFYTSVSRPGRGEPRFIAVGYVDDTQFVRFDSDAASQRMEPRAPWIEQEGPEYWDRNTRKVKAQSQTDRVDLGTLRGYYNQSEDGSHTIQRMYGCDVGPDGRFLRGYQQDAYDGKDYIALNEDLRSWTAADMAAQITQRKWETAHEAEQWRAYLEGTCVEWLRRYLENGKETLQRTDAPKTHMTHHAVSDHEATLRCWALSFYPAEITLTWQRDGEDQTQDTELVETRPAGDGTFQKWASVVVPSGQEQRYTCHVQHEGLPKPLTLRWEP

SEQ ID NO: 61 - protein, 276 aa, Artificial sequence
  synthetic sequence
  Misc_feature (9)..(9): X is phenylalanine, tyrosine, serine, or threonine
  Misc_feature (44)..(44): X is lysine or arginine
  Misc_feature (62)..(62): X is glutamine, glycine, glutamic acid, or arginine
  Misc_feature (63)..(63): X is asparagine or glutamic acid
  Misc_feature (65)..(65): X is arginine or glycine
  Misc_feature (66)..(66): X is asparagine or lysine
  Misc_feature (67)..(67): X is methionine or valine
  Misc_feature (70)..(70): X is histidine or glutamine
  Misc_feature (73)..(73): X is threonine or isoleucine
  Misc_feature (74)..(74): X is aspartic acid or histidine
  Misc_feature (76)..(76): X is alanine, valine, or glutamic acid
  Misc_feature (77)..(77): X is asparagine or aspartic acid
  Misc_feature (79)..(79): X is glycine or arginine
  Misc_feature (80)..(80): X is threonine or arginine
  Misc_feature (81)..(81): X is leucine or alanine
  Misc_feature (82)..(82): X is arginine or leucine
  Misc_feature (83)..(83): X is glycine ir arginine
  Misc_feature (90)..(90): X is alanine or aspartic acid
  Misc_feature (95)..(95): X is isoleucine, leucine, or valine
  Misc_feature (97)..(97): X is isoleucine, arginine, or methionine
  Misc_feature (99)..(99): X is phenylalanine or tyrosine
  Misc_feature (105)..(105): X is serine or proline
  Misc_feature (107)..(107): X is tryptophan or glycine
  Misc_feature (114)..(114): X is arginine, histidine, or glutamine
  Misc_feature (116)..(116): X is aspartic acid or tyrosine
  Misc_feature (127)..(127): X is asparagine or lysine
  Misc_feature (142)..(142): X is threonine or isoleucine
  Misc_feature (144)..(144): X is lysine or glutamine
  Misc_feature (145)..(145): X is arginine or histidine
  Misc_feature (149)..(149): X is alanine or threonine
  Misc_feature (150)..(150): X is alanine or valine
  Misc_feature (151)..(151): X is histidine or arginine
  Misc_feature (156)..(156): X is arginine, leucine, glutamine, or tryptophan
  Misc_feature (158)..(158): X is valine or alanine
  Misc_feature (161)..(161): X is aspartic acid or glutamic acid
  Misc_feature (163)..(163): X is arginine or threonine
  Misc_feature (166)..(166): X is aspartic acid or glutamic acid
  Misc_feature (167)..(167): X is tryptophan or glycine
  Misc_feature (184)..(184): X is proline or alanine
  Misc_feature (193)..(193): X is proline or alanine
  Misc_feature (194)..(194): X is valine or isoleucine
  Misc_feature (207)..(207): X is serine or glycine
  Misc_feature (246)..(246): X is alanine or serine
  Misc_feature (253)..(253): X is glutamine or glutamic acid
  Misc_feature (276)..(276): X is proline or leucine
GSHSMRYFXTSVSRPGRGEPRFIAVGYVDDTQFVRFDSDAASQXMEPRAPWIEQEGPEYWDXXTXXXKAXSQXXRXXLXXXXXYYNQSEXGSHTXQXMXGCDVGXDXRFLRGYXQXAYDGKDYIALXEDLRSWTAADMAAQXTXXKWEXXXEAEQXRXYLXGXCVXXLRRYLENGKETLQRTDXPKTHMTHHXXSDHEATLRCWALXFYPAEITLTWQRDGEDQTQDTELVETRPAGDGTFQKWAXVVVPSGXEQRYTCHVQHEGLPKPLTLRWEX

SEQ ID NO: 62 - protein, 276 aa, Artificial sequence [sequence omitted]

SEQ ID NO: 63 - protein, 276 aa, Artificial sequence
  synthetic sequence
GSHSMRYFDTAMSRPGRGEPRFISVGYVDDTQFVRFDSDAASPREEPRAPWIEQEGPEYWDRNTQIFKTNTQTDRESLRNLRGYYNQSEAGSHTLQSMYGCDVGPDGRLLRGHNQYAYDGKDYIALNEDLRSWTAADTAAQITQRKWEAARVAEQDRAYLEGTCVEWLRRYLENGKDTLERADPPKTHVTHHPISDHEATLRCWALGFYPAEITLTWQRDGEDQTQDTELVETRPAGDRTFQKWAAVVVPSGEEQRYTCHVQHEGLPKPLTLRWEP

SEQ ID NO: 64 - protein, 276 aa, Artificial sequence
  synthetic sequence
GSHSMRYFYTAMSRPGRGEPRFIAVGYVDDTQFVRFDSDAASPRMAPRAPWIEQEGPEYWDRNTQISKTNTQTYRESLRNLRGYYNQSEAGSHIIQRMYGCDVGPDGRLLRGYDQSAYDGKDYIALNEDLSSWTAADTAAQITQRKWEAAREAEQLRAYLEGLCVEWLRRYLENGKETLQRADPPKTHVTHHPISDHEATLRCWALGFYPAEITLTWQRDGEDQTQDTELVETRPAGDRTFQKWAAVVVPSGEEQRYTCHVQHEGLPKPLTLRWEP

SEQ ID NO: 65 - protein, 276 aa, Artificial sequence
  synthetic sequence
GSHSMRYFYTSVSRPGRGEPRFISVGYVDDTQFVRFDSDAASPREEPRAPWIEQEGPEYWDRNTQICKTNTQTYRENLRTALRYYNQSEAGSHTLQRMYGCDVGPDGRLLRGHNQFAYDGKDYIALNEDLSSWTAADTAAQITQRKWEAARVAEQLRTYLEGTCVEWLRRYLENGKETLQRADPPKTHVTHHPISDHEATLRCWALGFYPAEITLTWQRDGEDQTQDTELVETRPAGDRTFQKWAAVVVPSGEEQRYTCHVQHEGLPKPLTLRWEP

SEQ ID NO: 66 - protein, 276 aa, Artificial sequence
  synthetic sequence
GSHSMRYFHTAMSRPGRGEPRFITVGYVDDTLFVRFDSDATSPRKEPRAPWIEQEGPEYWDRETQISKTNTQTYRESLRNLRGYYNQSEAGSHTLQRMYGCDVGPDGRLLRGHNQYAYDGKDYIALNEDLRSWTAADTAAQISQRKLEAARVAEQLRAYLEGECVEWLRRYLENGKDKLERADPPKTHVTHHPISDHEATLRCWALGFYPAEITLTWQRDGEDQTQDTELVETRPAGDRTFQKWAAVVVPSGEEQRYTCHVQHEGLPKPLTLRWEP

SEQ ID NO: 67 - protein, 276 aa, Artificial sequence
  synthetic sequence
GSHSMRYFYTAMSRPGRGEPRFIAVGYVDDTQFVRFDSDAASPRMAPRAPWIEQEGPEYWDRETQKYKRQAQTDRVSLRNLRGYYNQSEAGSHTLQRMYGCDVGPDGRLLRGHDQSAYDGKDYIALNEDLSSWTAADTAAQITQRKWEAAREAEQWRAYLEGLCVEWLRRYLENGKETLQRADPPKTHVTHHPISDHEATLRCWALGFYPAEITLTWQRDGEDQTQDTELVETRPAGDRTFQKWAAVVVPSGEEQRYTCHVQHEGLPKPLTLRWEP

SEQ ID NO: 68 - protein, 276 aa, Artificial sequence
  synthetic sequence
GSHSMRYFYTAMSRPGRGEPRFIAVGYVDDTQFVRFDSDAASPRTEPRAPWIEQEGPEYWDRNTQIFKTNTQTYRENLRIALRYYNQSEAGSHIIQRMYGCDLGPDGRLLRGHDQSAYDGKDYIALNEDLSSWTAADTAAQITQRKWEAARVAEQLRAYLEGLCVEWLRRYLENGKETLQRADPPKTHVTHHPVSDHEATLRCWALGFYPAEITLTWQRDGEDQTQDTELVETRPAGDRTFQKWAAVVVPSGEEQRYTCHVQHEGLPKPLTLRWEP

SEQ ID NO: 69 - protein, 276 aa, Artificial sequence
  synthetic sequence
  Misc_feature (9)..(9): X is histidine, tyrosine, or aspartic acid
  Misc_feature (11)..(11): X is alanine or serine
  Misc_feature (12)..(12): X is methionine or valine
  Misc_feature (24)..(24): X is alanine, serine, or threonine
  Misc_feature (32)..(32): X is glutamine or leucine
  Misc_feature (41)..(41): X is alanine or threonine
  Misc_feature (45)..(45): X is glutamic acid, methionine, lysine, or threonine
  Misc_feature (46)..(46): X is alanine or threonine
  Misc_feature (63)..(63): X is glutamic acid or asparagine
  Misc_feature (66)..(66): X is isoleucine or lysine
  Misc_feature (67)..(67): X is tyrosine, phenylalanie, serine, or cystine
  Misc_feature (70)..(70): X is asparagine or glutamine
  Misc_feature (71)..(71): X is alanine or threonine
  Misc_feature (74)..(74): X is aspartic acid or tyrosine
  Misc_feature (76)..(76): X is glutamic acid or valine
  Misc_feature (77)..(77): X is serine or asparagine
  Misc_feature (80)..(80): X is threonine, asparagine, or isoleucine
  Misc_feature (81)..(81): X is alanine or leucine
  Misc_feature (82)..(82): X is leucine or arginine
  Misc_feature (83)..(83): X is arginine or glycine
  Misc_feature (94)..(94): X is threonine or isoleucine
  Misc_feature (95)..(95): X is leucine or isoleucine
  Misc_feature (97)..(97): X is arginine or serine
  Misc_feature (131)..(131): X is arginine or serine
  Misc_feature (143)..(143): X is S or T
  Misc_feature (147)..(147): X is L or W
  misc_feature (152)..(152): Xaa is E OR V
  misc_feature (156)..(156): Xaa is R, D, L
  misc_feature (158)..(158): Xaa A or T
  Misc_feature (163)..(163): X is leucine, glutamic acid, or threonine
  Misc_feature (177)..(177): X is glutamic acid or aspartic acid
  Misc_feature (178)..(178): X is lysine or threonine
  Misc_feature (180)..(180): X is glutamic acid or glutamine
  Misc_feature (194)..(194): X is isoleucine or valine
GSHSMRYFXTXXSRPGRGEPRFIXVGYVDDTXFVRFDSDAXSPRXXPRAPWIEQEGPEYWDRXTQXXKTXXTQXYXXNLXXXXYYNQSEAGSHXXQXMYGCDLGPDGRLLRGHDQSAYDGKDYIALNEDLXSWTAADTAAQIXQRKXEAARXAEQXRXYLEGXCVEWLRRYLENGKXXLXRADPPKTHVTHHPXSDHEATLRCWALGFYPAEITLTWQRDGEDQTQDTELVETRPAGDRTFQKWAAVVVPSGEEQRYTCHVQHEGLPKPLTLRWEP

SEQ ID NO: 70 - protein, 276 aa, Artificial sequence
  synthetic sequence
CSHSMKYFFTSVSRPGRGEPRFISVGYVDDTQFVRFDSDAASPRGEPRAPWVEQEGPEYWDRETQKYKRQAQTDRVSLRNLRGYYNQSEAGSHTLQWMCGCDLGPDGRLLRGYDQYAYDGKDYIALNEDLRSWTAADTAAQITQRKWEAAREAEQRRAYLEGTCVEWLRRYLENGKETLQRAEHPKTHVTHHPVSDHEATLRCWALGFYPAEITLTWQWDGEDQTQDTELVETRPAGDGTFQKWAAVMVPSGEEQRYTCHVQHEGLPEPLTLRWEP

SEQ ID NO: 71 - protein, 276 aa, Artificial sequence
  synthetic sequence
GSHSMRYFYTAVSRPGRGEPHFIAVGYVDDTQFVRFDSDAASPRGEPRAPWVEQEGPEYWDRETQKYKRQAQTDRVSLRNLRGYYNQSEARSHIIQRMYGCDVGPDGRLLRGYDQYAYDGKDYIALNEDLRSWTAADTAAQITQRKWEAAREAEQLRAYLEGLCVEWLRRYLKNGKETLQRAEHPKTHVTHHPVSDHEATLRCWALGFYPAEITLTWQWDGEDQTQDTELVETRPAGDGTFQKWAAVVVPSGEEQRYTCHVQHEGLPEPLTLRWEP

SEQ ID NO: 72 - protein, 276 aa, Artificial sequence
  synthetic sequence
GSHSMRYFYTAVSRPGRGEPHFIAVGYVDDTQFVRFDSDAASPRGEPRAPWVEQEGPEYWDRETQKYKRQAQTDRVSLRNLRGYYNQSEAGSHIIQRMYGCDVGPDGRLLRGYDQYAYDGKDYIALNEDLRSWTAADTAAQITQRKWEAAREAEQLRAYLEGLCVEWLRRYLKNGKETLQRAEHPKTHVTHHPVSDHEATLRCWALGFYPAEITLTWQWDGEDQTQDTELVETRPAGDGTFQKWAAVVVPSGEEQRYTCHVQHEGLPEPLTLRWEP

SEQ ID NO: 73 - protein, 276 aa, Artificial sequence
  synthetic sequence
GSHSMRYFSTSVSWPGRGEPRFIAVGYVDDTQFVRFDSDAASPRGEPREPWVEQEGPEYWDRETQKYKRQAQADRVNLRKLRGYYNQSEDGSHTLQRMFGCDLGPDGRLLRGYNQFAYDGKDYIALNEDLRSWTAADTAAQITQRKWEAAREAEQRRAYLEGTCVEWLRRYLENGKETLQRAEHPKTHVTHHPVSDHEATLRCWALGFYPAEITLTWQWDGEDQTQDTELVETRPAGDGTFQKWAAVVVPSGEEQRYTCHVQHEGLPEPLTLRWKP

SEQ ID NO: 74 - protein, 276 aa, Artificial sequence
  synthetic sequence
CSHSMRYFDTAVSRPGRGEPRFISVGYVDDTQFVRFDSDAASPRGEPRAPWVEQEGPEYWDRETQKYKRQAQADRVNLRKLRGYYNQSEDGSHTLQWMYGCDLGPDGRLLRGYDQSAYDGKDYIALNEDLRSWTAADTAAQITQRKWEAAREAEQWRAYLEGTCVEWLRRYLENGKETLQRAEHPKTHVTHHPVSDHEATLRCWALGFYPAEITLTWQRDGEDQTQDTELVETRPAGDGTFQKWAAVVVPSGEEQRYTCHVQHEGLPEPLTLRWEP

SEQ ID NO: 75 - protein, 276 aa, Artificial sequence
  synthetic sequence
CSHSMRYFDTAVSRPGRGEPRFISVGYVDDTQFVRFDSDAASPRGEPRAPWVEQEGPEYWDRETQNYKRQAQADRVSLRNLRGYYNQSEDGSHTLQRMYGCDLGPDGRLLRGYDQSAYDGKDYIALNEDLRSWTAADTAAQITQRKLEAARAAEQLRAYLEGTCVEWLRRYLENGKETLQRAEPPKTHVTHHPLSDHEATLRCWALGFYPAEITLTWQRDGEDQTQDTELVETRPAGDGTFQKWAAVVVPSGQEQRYTCHMQHEGLQEPLTLSWEP

SEQ ID NO: 76 - protein, 276 aa, Artificial sequence
  synthetic sequence
CSHSMRYFDTAVSRPGRGEPRFISVGYVDDTQFVRFDSDAASPRGEPRAPWVEQEGPEYWDRETQKYKRQAQADRVSLRNLRGYYNQSEDGSHTLQRMSGCDLGPDGRLLRGYDQSAYDGKDYIALNEDLRSWTAADTAAQITQRKLEAARAAEQLRAYLEGTCVEWLRRYLENGKETLQRAEPPKTHVTHHPLSDHEATLRCWALGFYPAEITLTWQRDGEDQTQDTELVETRPAGDGTFQKWAAVVVPSGQEQRYTCHMQHEGLQEPLTLSWEP

SEQ ID NO: 77 - protein, 276 aa, Artificial sequence
  synthetic sequence
CSHSMRYFYTAVSRPGRGEPRFIAVGYVDDTQFVQFDSDAASPRGEPRAPWVEQEGPEYWDRETQKYKRQAQTDRVSLRNLRGYYNQSEAGSHTLQRMYGCDLGPDGRLLRGYNQFAYDGKDYIALNEDLRSWTAADTAAQITQRKWEAARTAEQLRAYLEGTCVEWLRRYLENGKKTLQRAEHPKTHVTHHPVSDHEATLRCWALGFYPAEITLTWQRDGEDQTQDTELVETRPAGDGTFQKWAAVVVPSGEEQRYTCHVQHEGLPEPLTLRWGP

SEQ ID NO: 78 - protein, 276 aa, Artificial sequence
  synthetic sequence
CSHSMRYFYTAVSRPGRGEPHFIAVGYVDDTQFVRFDSDAASPRGEPRAPWVEQEGPEYWDRETQNYKRQAQTDRVNLRKLRGYYNQSEAGSHIIQRMYGCDLGPDGRLLRGHDQLAYDGKDYIALNEDLRSWTAADTAAQITQRKWEAAREAEQLRAYLEGTCVEWLRRYLENGKETLQRAEHPKTHVTHHPVSDHEATLRCWALGFYPAEITLTWQRDGEDQTQDTELVETRPAGDGTFQKWAAVVVPSGEEQRYTCHVQHEGLPEPLTLRWEP

SEQ ID NO: 79 - protein, 276 aa, Artificial sequence
  synthetic sequence
  Misc_feature (1)..(1): X is cysteine or glycine
  Misc_feature (6)..(6): X is arginine or lysine
  Misc_feature (9)..(9): X is phenylalanine, tyrosine, serine, or aspartic acid
  Misc_feature (14)..(14): X is arginine or tryptophan
  Misc_feature (21)..(21): X is histidine or arginine
  Misc_feature (24)..(24): X is alanine or serine
  Misc_feature (35)..(35): X is glutamine or arginine
  Misc_feature (49)..(49): X is alanine or arginine
  Misc_feature (66)..(66): X is asparagine, or lysine
  Misc_feature (73)..(73): X is threonine or alanine
  Misc_feature (77)..(77): X is serine or asparagine
  Misc_feature (80)..(80): X is asparagine or lysine
  Misc_feature (90)..(90): X is alanine or aspartic acid
  Misc_feature (91)..(91): X is glycine or arginine
  Misc_feature (94)..(94): X is threonine or isoleucine
  Misc_feature (95)..(95): X is leucine or isoleucine
  Misc_feature (97)..(97): X is tryptophan or arginine
  Misc_feature (99)..(99): X is cysteine, tyrosine, phenylalanine, or serine
  Misc_feature (103)..(103): X is leucine or valine
  Misc_feature (113)..(113): X is tyrosine or histidine
  Misc_feature (114)..(114): X is aspartic acid or asparagine
  Misc_feature (116)..(116): X is tyrosine, phenylalanine, serine, or leucine
  Misc_feature (147)..(147): X is leucine or tryptophan
  Misc_feature (152)..(152): X is glutamic acid, alanine, or threonine
  Misc_feature (156)..(156): X is arginine, leucine, or tryptophan
  Misc_feature (163)..(163): X is leucine or threonine
  Misc_feature (173)..(173): X is glutamic acid or lysine
  Misc_feature (177)..(177): X is glutamic acid or lysine
  Misc_feature (184)..(184): X is histidine or proline
  Misc_feature (194)..(194): X is arginine or valine
  Misc_feature (219)..(219): X is tryptophan or arginine
  Misc_feature (248)..(248): X is valine or methionine
  Misc_feature (253)..(253): X is glutamic acid or lysine
  Misc_feature (261)..(261): X is methionine or valine
  Misc_feature (267)..(267): X is proline or glutamine
  Misc_feature (273)..(273): X is arginine or serine
  Misc_feature (275)..(275): X is proline or glycine
XSHSMXYFXTAVSXPGRGEPXFIXVGYVDDTQFVXFDSDAASPRGEPRXPWVEQEGPEYWDRETQXYKRQAQXDRVXLRXLRGYYNQSEXXSHXXQXMXGCDXGPDGRLLRGXXQXAYDGKDYIALNEDLRSWTAADTAAQITQRKXEAARXAEQXRAYLEGXCVEWLRRYLXNGKXTLQRAEXPKTHVTHHPXSDHEATLRCWALGFYPAEITLTWQXDGEDQTQDTELVETRPAGDGTFQKWAAVXVPSGXEQRYTCHXQHEGLXEPLTLXWXP

SEQ ID NO: 80 - protein, 284 aa, Artificial sequence
  synthetic sequence
  misc_feature (89)..(89): Xaa is K or E
  misc_feature (107)..(107): Xaa is R or G
  misc_feature (157)..(157): Xaa is R or G
  misc_feature (158)..(158): Xaa is A or V
  misc_feature (255)..(255): Xaa is Q or P
  misc_feature (267)..(267): Xaa is P or S
GSHSLKYFHTSVSRPGRGEPRFISVGYVDDTQFVRFDNDAASPRMVPRAPWMEQEGSEYWDRETRSARDTAQIFRVNLRTLRGYYNQSXAGSHTLQWMHGCELGPDXRFLRGYEQFAYDGKDYLTLNEDLRSWTAVDTAAQISEQKSNDASEAEHQXXYLEDTCVEWLHKYLEKGKETLLHLEPPKTHVTHHPISDHEATLRCWALGFYPAEITLTWQQDGEGHTQDTELVETRPAGDGTFQKWAAVVVPSGEEXRYTCHVQHEGLXEPVTLRWKPASQPTIPI

SEQ ID NO: 81 - protein, 284 aa, Artificial sequence
  synthetic sequence
  misc_feature (7)..(7): Xaa is Y or F
  misc_feature (50)..(50): Xaa is P or Q
  misc_feature (251)..(251): Xaa is S or P
  misc_feature (278)..(278): Xaa is P or L
GSHSLRXFSTAVSRPGRGEPRYIAVEYVDDTQFLRFDSDAAIPRMEPREXWVEQEGPQYWEWTTGYAKANAQTDRVALRNLLRRYNQSEAGSHTLQGMNGCDMGPDGRLLRGYHQHAYDGKDYISLNEDLRSWTAADTVAQITQRFYEAEEYAEEFRTYLEGECLELLRRYLENGKETLQRADPPKAHVAHHPISDHEATLRCWALGFYPAEITLTWQRDGEEQTQDTELVETRPAGDGTFQKWAAVVVPXGEEQRYTCHVQHEGLPQPLILRWEQSXQPTIPI

SEQ ID NO: 82 - protein, 284 aa, Artificial sequence
  synthetic sequence
  misc_feature (13)..(13): Xaa is S or F
  misc_feature (27)..(27): Xaa is Y or H
  misc_feature (31)..(31): Xaa is T, S, or M
  misc_feature (34)..(34): Xaa is L or V
  misc_feature (54)..(54): Xaa is Q or R
  misc_feature (81)..(81): Xaa is P or L
  misc_feature (100)..(100): Xaa is G or D
  misc_feature (104)..(104): Xaa is G or V
  misc_feature (105)..(105): Xaa is S or C
  misc_feature (110)..(110): Xaa is L or I
  misc_feature (159)..(159): Xaa is Y or H
  misc_feature (169)..(169): Xaa is H or R
  misc_feature (171)..(171): Xaa is Y or H
  misc_feature (178)..(178): Xaa is M or T
  misc_feature (185)..(185): Xaa is P or A
  misc_feature (219)..(219): Xaa is R, W, or Q
  misc_feature (258)..(258): Xaa is T or M
  misc_feature (275)..(275): Xaa is K or E
GSHSMRYFSAAVXRPGRGEPRFIAMGXVDDXQFXRFDSDSACPRMEPRAPWVEXEGPEYWEEETRNTKAHAQTDRMNLQTXRGYYNQSEASSHTLQWMIXCDLXXDGRLXRGYEQYAYDGKDYLALNEDLRSWTAADTAAQISKRKCEAANVAEQRRAXLEGTCVEWLXRXLENGKEXLQRADPXKTHVTHHPVFDYEATLRCWALGFYPAEIILTWQXDGEDQTQDVELVETRPAGDGTFQKWAAVVVPSGEEQRYXCHVQHEGLPEPLMLRWXQSSLPTIPI

SEQ ID NO: 83 - protein, 276 aa, Artificial sequence; identical to SEQ ID NO: 61
  synthetic sequence
  Misc_feature (9)..(9): X is phenylalanine, tyrosine, serine, or threonine
  Misc_feature (44)..(44): X is lysine or arginine
  Misc_feature (62)..(62): X is glutamine, glycine, glutamic acid, or arginine
  Misc_feature (63)..(63): X is asparagine or glutamic acid
  Misc_feature (65)..(65): X is arginine or glycine
  Misc_feature (66)..(66): X is asparagine or lysine
  Misc_feature (67)..(67): X is methionine or valine
  Misc_feature (70)..(70): X is histidine or glutamine
  Misc_feature (73)..(73): X is threonine or isoleucine
  Misc_feature (74)..(74): X is aspartic acid or histidine
  Misc_feature (76)..(76): X is alanine, valine, or glutamic acid
  Misc_feature (77)..(77): X is asparagine or aspartic acid
  Misc_feature (79)..(79): X is glycine or arginine
  Misc_feature (80)..(80): X is threonine or arginine
  Misc_feature (81)..(81): X is leucine or alanine
  Misc_feature (82)..(82): X is arginine or leucine
  Misc_feature (83)..(83): X is glycine ir arginine
  Misc_feature (90)..(90): X is alanine or aspartic acid
  Misc_feature (95)..(95): X is isoleucine, leucine, or valine
  Misc_feature (97)..(97): X is isoleucine, arginine, or methionine
  Misc_feature (99)..(99): X is phenylalanine or tyrosine
  Misc_feature (105)..(105): X is serine or proline
  Misc_feature (107)..(107): X is tryptophan or glycine
  Misc_feature (114)..(114): X is arginine, histidine, or glutamine
  Misc_feature (116)..(116): X is aspartic acid or tyrosine
  Misc_feature (127)..(127): X is asparagine or lysine
  Misc_feature (142)..(142): X is threonine or isoleucine
  Misc_feature (144)..(144): X is lysine or glutamine
  Misc_feature (145)..(145): X is arginine or histidine
  Misc_feature (149)..(149): X is alanine or threonine
  Misc_feature (150)..(150): X is alanine or valine
  Misc_feature (151)..(151): X is histidine or arginine
  Misc_feature (156)..(156): X is arginine, leucine, glutamine, or tryptophan
  Misc_feature (158)..(158): X is valine or alanine
  Misc_feature (161)..(161): X is aspartic acid or glutamic acid
  Misc_feature (163)..(163): X is arginine or threonine
  Misc_feature (166)..(166): X is aspartic acid or glutamic acid
  Misc_feature (167)..(167): X is tryptophan or glycine
  Misc_feature (184)..(184): X is proline or alanine
  Misc_feature (193)..(193): X is proline or alanine
  Misc_feature (194)..(194): X is valine or isoleucine
  Misc_feature (207)..(207): X is serine or glycine
  Misc_feature (246)..(246): X is alanine or serine
  Misc_feature (253)..(253): X is glutamine or glutamic acid
  Misc_feature (276)..(276): X is proline or leucine

SEQ ID NO: 84 - protein, 276 aa, Artificial sequence; identical to SEQ ID NO: 69
  synthetic sequence
  Misc_feature (9)..(9): X is histidinem tyrosine, or aspartic acid
  Misc_feature (11)..(11): X is alanine or serine
  Misc_feature (12)..(12): X is methionine or valine
  Misc_feature (24)..(24): X is alanine, serine, or threonine
  Misc_feature (32)..(32): X is glutamie or leucine
  Misc_feature (41)..(41): X is alanine or threonine
  Misc_feature (45)..(45): X is glutamic acid, methionine, lysine, or threonine
  Misc_feature (46)..(46): X is alanine or threonine
  Misc_feature (63)..(63): X is glutamic acid or asparagine
  Misc_feature (66)..(66): X is isoleucine or lysine
  Misc_feature (67)..(67): X is tyrosine, phenylalanie, serine, or cystine
  Misc_feature (70)..(70): X is asparagine or glutamine
  Misc_feature (71)..(71): X is alanine or threonine
  Misc_feature (74)..(74): X is aspartic acid or tyrosine
  Misc_feature (76)..(76): X is glutamic acid or valine
  Misc_feature (77)..(77): X is serine or asparagine
  Misc_feature (80)..(80): X is threonine, asparagine, or isoleucine
  Misc_feature (81)..(81): X is alanine or leucine
  Misc_feature (82)..(82): X is leucine or arginine
  Misc_feature (83)..(83): X is arginine or glycine
  Misc_feature (94)..(94): X is threonine or isoleucine
  Misc_feature (95)..(95): X is leucine or isoleucine
  Misc_feature (97)..(97): X is arginine or serine
  Misc_feature (131)..(131): X is arginine or serine
  Misc_feature (143)..(143): X is S or T
  Misc_feature (147)..(147): X is L or W
  misc_feature (152)..(152): Xaa is E OR V
  misc_feature (156)..(156): Xaa is R, D, L
  misc_feature (158)..(158): Xaa A or T
  Misc_feature (163)..(163): X is leucine, glutamic acid, or threonine
  Misc_feature (177)..(177): X is glutamic acid or aspartic acid
  Misc_feature (178)..(178): X is lysine or threonine
  Misc_feature (180)..(180): X is glutamic acid or glutamine
  Misc_feature (194)..(194): X is isoleucine or valine

SEQ ID NO: 85 - protein, 276 aa, Artificial sequence; identical to SEQ ID NO: 79
  synthetic sequence
  Misc_feature (1)..(1): X is cysteine or glycine
  Misc_feature (6)..(6): X is arginine or lysine
  Misc_feature (9)..(9): X is phenylalanine, tyrosine, serine, or aspartic acid
  Misc_feature (14)..(14): X is arginine or tryptophan
  Misc_feature (21)..(21): X is histidine or arginine
  Misc_feature (24)..(24): X is alanine or serine
  Misc_feature (35)..(35): X is glutamine or arginine
  Misc_feature (49)..(49): X is alanine or arginine
  Misc_feature (66)..(66): X is asparagine, or lysine
  Misc_feature (73)..(73): X is threonine or alanine
  Misc_feature (77)..(77): X is serine or asparagine
  Misc_feature (80)..(80): X is asparagine or lysine
  Misc_feature (90)..(90): X is alanine or aspartic acid
  Misc_feature (91)..(91): X is glycine or arginine
  Misc_feature (94)..(94): X is threonine or isoleucine
  Misc_feature (95)..(95): X is leucine or isoleucine
  Misc_feature (97)..(97): X is tryptophan or arginine
  Misc_feature (99)..(99): X is cysteine, tyrosine, phenylalanine, or serine
  Misc_feature (103)..(103): X is leucine or valine
  Misc_feature (113)..(113): X is tyrosine or histidine
  Misc_feature (114)..(114): X is aspartic acid or asparagine
  Misc_feature (116)..(116): X is tyrosine, phenylalanine, serine, or leucine
  Misc_feature (147)..(147): X is leucine or tryptophan
  Misc_feature (152)..(152): X is glutamic acid, alanine, or threonine
  Misc_feature (156)..(156): X is arginine, leucine, or tryptophan
  Misc_feature (163)..(163): X is leucine or threonine
  Misc_feature (173)..(173): X is glutamic acid or lysine
  Misc_feature (177)..(177): X is glutamic acid or lysine
  Misc_feature (184)..(184): X is histidine or proline
  Misc_feature (194)..(194): X is arginine or valine
  Misc_feature (219)..(219): X is tryptophan or arginine
  Misc_feature (248)..(248): X is valine or methionine
  Misc_feature (253)..(253): X is glutamic acid or lysine
  Misc_feature (261)..(261): X is methionine or valine
  Misc_feature (267)..(267): X is proline or glutamine
  Misc_feature (273)..(273): X is arginine or serine
  Misc_feature (275)..(275): X is proline or glycine

SEQ ID NO: 86 - protein, 284 aa, Artificial sequence; identical to SEQ ID NO: 80
  synthetic sequence
  misc_feature (89)..(89): Xaa is K or E
  misc_feature (107)..(107): Xaa is R or G
  misc_feature (157)..(157): Xaa is R or G
  misc_feature (158)..(158): Xaa is A or V
  misc_feature (255)..(255): Xaa is Q or P
  misc_feature (267)..(267): Xaa is P or S

SEQ ID NO: 87 - protein, 284 aa, Artificial sequence; identical to SEQ ID NO: 81
  synthetic sequence
  misc_feature (7)..(7): Xaa is Y or F
  misc_feature (50)..(50): Xaa is P or Q
  misc_feature (251)..(251): Xaa is S or P
  misc_feature (278)..(278): Xaa is P or L

SEQ ID NO: 88 - protein, 284 aa, Artificial sequence; identical to SEQ ID NO: 82
  synthetic sequence
  misc_feature (13)..(13): Xaa is S or F
  misc_feature (27)..(27): Xaa is Y or H
  misc_feature (31)..(31): Xaa is T, S, or M
  misc_feature (34)..(34): Xaa is L or V
  misc_feature (54)..(54): Xaa is Q or R
  misc_feature (81)..(81): Xaa is P or L
  misc_feature (100)..(100): Xaa is G or D
  misc_feature (104)..(104): Xaa is G or V
  misc_feature (105)..(105): Xaa is S or C
  misc_feature (110)..(110): Xaa is L or I
  misc_feature (159)..(159): Xaa is Y or H
  misc_feature (169)..(169): Xaa is H or R
  misc_feature (171)..(171): Xaa is Y or H
  misc_feature (178)..(178): Xaa is M or T
  misc_feature (185)..(185): Xaa is P or A
  misc_feature (219)..(219): Xaa is R, W, or Q
  misc_feature (258)..(258): Xaa is T or M
  misc_feature (275)..(275): Xaa is K or E

SEQ ID NO: 89 - protein, 763 aa, Artificial sequence
  synthetic sequence
GSHSMRYFFTSVSRPGRGEPRFIAVGYVDDTQFVRFDSDAASQRMEPRAPWIEQEGPEYWDGETRKVKAHSQTHRVDLGTLRGAYNQSEAGSHTVQRMYGCDVGSDWRFLRGYHQYAYDGKDYIALKEDLRSWTAADMAAQTTKHKWEAAHVAEQLRAYLEGTCVEWLRRYLENGKETLQRTDAPKTHMTHHAVSDHEATLRCWALSFYPAEITLTWQRDGEDQTQDTELVETRPCGDGTFQKWAAVVVPSGQEQRYTCHVQHEGLPKPLTLRWEAAAGGDKTHTCPPCPAPEAAGGPSVFLFPPKPKDTLMISRTPEVTCVVVDVSHEDPEVKFNWYVDGVEVHNAKTKPREEQYNSTYRVVSVLTVLHQDWLNGKEYKCKVSNKALPAPIEKTISKAKGQPREPQVYTLPPSREEMTKNQVSLTCLVKGFYPSDIAVEWESNGQPENNYKTTPPVLDSDGSFFLYSKLTVDKSRWQQGNVFSCSVMHEALHNHYTQKSLSLSPGGGGGSGGGGSGGGGSEVQLVESGGGLVQPGGSLRLSCAASGFNIKDTYIHWVRQAPGKGLEWVARIYPTNGYTRYADSVKGRFTISADTSKNTAYLQMNSLRAEDTAVYYCSRWGGDGFYAMDYWGQGTLVTVSSGGGGSGGGGSGGGGSDIQMTQSPSSLSASVGDRVTITCRASQDVNTAVAWYQQKPGKAPKLLIYSASFLYSGVPSRFSGSRSGTDFTLTISSLQPEDFATYYCQQHYTTPPTFGQGTKVEIK

SEQ ID NO: 90 - protein, 1069 aa, Artificial sequence
  synthetic sequence
APTSSSTKKTQLQLEALLLDLQMILNGINNYKNPKLTRMLTAKFYMPKKATELKHLQCLEEELKPLEEVLNLAQSKNFHLRPRDLISNINVIVLELKGSETTFMCEYADETATIVEFLNRWITFCQSIISTLTGGGGSGGGGSGGGGSGGGGSAPTSSSTKKTQLQLEALLLDLQMILNGINNYKNPKLTRMLTAKFYMPKKATELKHLQCLEEELKPLEEVLNLAQSKNFHLRPRDLISNINVIVLELKGSETTFMCEYADETATIVEFLNRWITFCQSIISTLTGGGGSGGGGSGGGGSGGGGSGSHSMRYFFTSVSRPGRGEPRFIAVGYVDDTQFVRFDSDAASQRMEPRAPWIEQEGPEYWDGETRKVKAHSQTHRVDLGTLRGAYNQSEAGSHTVQRMYGCDVGSDWRFLRGYHQYAYDGKDYIALKEDLRSWTAADMAAQTTKHKWEAAHVAEQLRAYLEGTCVEWLRRYLENGKETLQRTDAPKTHMTHHAVSDHEATLRCWALSFYPAEITLTWQRDGEDQTQDTELVETRPCGDGTFQKWAAVVVPSGQEQRYTCHVQHEGLPKPLTLRWEAAAGGDKTHTCPPCPAPEAAGGPSVFLFPPKPKDTLMISRTPEVTCVVVDVSHEDPEVKFNWYVDGVEVHNAKTKPREEQYNSTYRVVSVLTVLHQDWLNGKEYKCKVSNKALPAPIEKTISKAKGQPREPQVYTLPPSREEMTKNQVSLTCLVKGFYPSDIAVEWESNGQPENNYKTTPPVLDSDGSFFLYSKLTVDKSRWQQGNVFSCSVMHEALHNHYTQKSLSLSPGGGGGSGGGGSGGGGSEVQLVESGGGLVQPGGSLRLSCAASGFNIKDTYIHWVRQAPGKGLEWVARIYPTNGYTRYADSVKGRFTISADTSKNTAYLQMNSLRAEDTAVYYCSRWGGDGFYAMDYWGQGTLVTVSSGGGGSGGGGSGGGGSDIQMTQSPSSLSASVGDRVTITCRASQDVNTAVAWYQQKPGKAPKLLIYSASFLYSGVPSRFSGSRSGTDFTLTISSLQPEDFATYYCQQHYTTPPTFGQGTKVEIK

SEQ ID NO: 91 - protein, 771 aa, Artificial sequence
  synthetic sequence
GSHSMRYFFTSVSRPGRGEPRFIAVGYVDDTQFVRFDSDAASQRMEPRAPWIEQEGPEYWDGETRKVKAHSQTHRVDLGTLRGAYNQSEAGSHTVQRMYGCDVGSDWRFLRGYHQYAYDGKDYIALKEDLRSWTAADMAAQTTKHKWEAAHVAEQLRAYLEGTCVEWLRRYLENGKETLQRTDAPKTHMTHHAVSDHEATLRCWALSFYPAEITLTWQRDGEDQTQDTELVETRPCGDGTFQKWAAVVVPSGQEQRYTCHVQHEGLPKPLTLRWEAAAGGDKTHTCPPCPAPEAAGGPSVFLFPPKPKDTLMISRTPEVTCVVVDVSHEDPEVKFNWYVDGVEVHNAKTKPREEQYNSTYRVVSVLTVLHQDWLNGKEYKCKVSNKALPAPIEKTISKAKGQPREPQVYTLPPSREEMTKNQVSLTCLVKGFYPSDIAVEWESNGQPENNYKTTPPVLDSDGSFFLYSKLTVDKSRWQQGNVFSCSVMHEALHNHYTQKSLSLSPGGGGGSGGGGSGGGGSDIQLTQSPASLAVSLGQRATISCKASQSVDYDGDSYLNWYQQIPGQPPKLLIYDASNLVSGIPPRFSGSGSGTDFTLNIHPVEKVDAATYHCQQSTEDPWTFGGGTKLEIKGGGGSGGGGSGGGGSQVQLQQSGAELVRPGSSVKISCKASGYAFSSYWMNWVKQRPGQGLEWIGQIWPGDGDTNYNGKFKGKATLTADESSSTAYMQLSSLASEDSAVYFCARRETTTVGRYYYAMDYWGQGTTVTVSS

SEQ ID NO: 92 - protein, 1077 aa, Artificial sequence
  synthetic sequence
APTSSSTKKTQLQLEALLLDLQMILNGINNYKNPKLTRMLTAKFYMPKKATELKHLQCLEEELKPLEEVLNLAQSKNFHLRPRDLISNINVIVLELKGSETTFMCEYADETATIVEFLNRWITFCQSIISTLTGGGGSGGGGSGGGGSGGGGSAPTSSSTKKTQLQLEALLLDLQMILNGINNYKNPKLTRMLTAKFYMPKKATELKHLQCLEEELKPLEEVLNLAQSKNFHLRPRDLISNINVIVLELKGSETTFMCEYADETATIVEFLNRWITFCQSIISTLTGGGGSGGGGSGGGGSGGGGSGSHSMRYFFTSVSRPGRGEPRFIAVGYVDDTQFVRFDSDAASQRMEPRAPWIEQEGPEYWDGETRKVKAHSQTHRVDLGTLRGAYNQSEAGSHTVQRMYGCDVGSDWRFLRGYHQYAYDGKDYIALKEDLRSWTAADMAAQTTKHKWEAAHVAEQLRAYLEGTCVEWLRRYLENGKETLQRTDAPKTHMTHHAVSDHEATLRCWALSFYPAEITLTWQRDGEDQTQDTELVETRPCGDGTFQKWAAVVVPSGQEQRYTCHVQHEGLPKPLTLRWEAAAGGDKTHTCPPCPAPEAAGGPSVFLFPPKPKDTLMISRTPEVTCVVVDVSHEDPEVKFNWYVDGVEVHNAKTKPREEQYNSTYRVVSVLTVLHQDWLNGKEYKCKVSNKALPAPIEKTISKAKGQPREPQVYTLPPSREEMTKNQVSLTCLVKGFYPSDIAVEWESNGQPENNYKTTPPVLDSDGSFFLYSKLTVDKSRWQQGNVFSCSVMHEALHNHYTQKSLSLSPGGGGGSGGGGSGGGGSDIQLTQSPASLAVSLGQRATISCKASQSVDYDGDSYLNWYQQIPGQPPKLLIYDASNLVSGIPPRFSGSGSGTDFTLNIHPVEKVDAATYHCQQSTEDPWTFGGGTKLEIKGGGGSGGGGSGGGGSQVQLQQSGAELVRPGSSVKISCKASGYAFSSYWMNWVKQRPGQGLEWIGQIWPGDGDTNYNGKFKGKATLTADESSSTAYMQLSSLASEDSAVYFCARRETTTVGRYYYAMDYWGQGTTVTVSS

SEQ ID NO: 93 - protein, 114 aa, Artificial sequence
  synthetic sequence
  misc_feature (1)..(1): Xaa can be attached to a peptide
GGGGSGGGGSGGGGSIQRTPKIQVYSCHPAENGKSNFLNCYVSGFHPSDIEVDLLKNGERIEKVEHSDLSFSKDWSFYLLYYTEFTPTEKDEYACRVNHVTLSQPKIVKWDRDM

SEQ ID NO: 94 - protein, 416 aa, Artificial sequence
  synthetic sequence
  misc_feature (1)..(1): Xaa can be attached to a peptide
XGGGGSGGGGSGGGGSIQRTPKIQVYSCHPAENGKSNFLNCYVSGFHPSDIEVDLLKNGERIEKVEHSDLSFSKDWSFYLLYYTEFTPTEKDEYACRVNHVTLSQPKIVKWDRDMGGGGSGGGGSGGGGSAPTSSSTKKTQLQLEALLLDLQMILNGINNYKNPKLTRMLTAKFYMPKKATELKHLQCLEEELKPLEEVLNLAQSKNFHLRPRDLISNINVIVLELKGSETTFMCEYADETATIVEFLNRWITFCQSIISTLTGGGGSGGGGSGGGGSGGGGSAPTSSSTKKTQLQLEALLLDLQMILNGINNYKNPKLTRMLTAKFYMPKKATELKHLQCLEEELKPLEEVLNLAQSKNFHLRPRDLISNINVIVLELKGSETTFMCEYADETATIVEFLNRWITFCQSIISTLT

SEQ ID NO: 95 - protein, 123 aa, Artificial sequence
  synthetic sequence
NLVPMVATVGGGASGGGGSGGGGSIQRTPKIQVYSCHPAENGKSNFLNCYVSGFHPSDIEVDLLKNGERIEKVEHSDLSFSKDWSFYLLYYTEFTPTEKDEYACRVNHVTLSQPKIVKWDRDM

SEQ ID NO: 96 - protein, 123 aa, Artificial sequence
  synthetic sequence
NLVPMVATVGCGGSGGGGSGGGGSIQRTPKIQVYSCHPAENGKSNFLNCYVSGFHPSDIEVDLLKNGERIEKVEHSDLSFSKDWSFYLLYYTEFTPTEKDEYACRVNHVTLSQPKIVKWDRDM

SEQ ID NO: 97 - protein, 123 aa, Artificial sequence
  synthetic sequence
NLVPMVATVGCGGSGGGGSGGGGSIQRTPKIQVYSRHPAENGKSNFLNCYVSGFHPSDIEVDLLKNGERIEKVEHSDLSFSKDWSFYLLYYTEFTPTEKDEYACRVNHVTLSQPKIVKWDRDM

SEQ ID NO: 98 - protein, 5 aa, Artificial sequence
  synthetic sequence
GTLRG

SEQ ID NO: 99 - protein, 5 aa, Artificial sequence
  synthetic sequence
YNQSE

SEQ ID NO: 100 - protein, 5 aa, Artificial sequence
  synthetic sequence
TAADM

SEQ ID NO: 101 - protein, 5 aa, Artificial sequence
  synthetic sequence
AQTTK

SEQ ID NO: 102 - protein, 5 aa, Artificial sequence
  synthetic sequence
VETRP

SEQ ID NO: 103 - protein, 5 aa, Artificial sequence
  synthetic sequence
GDGTF

SEQ ID NO: 104 - protein, 5 aa, Artificial sequence
  synthetic sequence
RNLRG

SEQ ID NO: 105 - protein, 5 aa, Artificial sequence
  synthetic sequence
TAADT

SEQ ID NO: 106 - protein, 5 aa, Artificial sequence
  synthetic sequence
AQITQ

SEQ ID NO: 107 - protein, 5 aa, Artificial sequence
  synthetic sequence
GDRTF

SEQ ID NO: 108 - protein, 276 aa, Artificial sequence [sequence omitted]

SEQ ID NO: 109 - protein, 276 aa, Artificial sequence [sequence omitted]

SEQ ID NO: 110 - protein, 275 aa, Artificial sequence [sequence omitted]

SEQ ID NO: 111 - protein, 276 aa, Artificial sequence; identical to SEQ ID NO: 48
  synthetic sequence

SEQ ID NO: 112 - protein, 276 aa, Artificial sequence; identical to SEQ ID NO: 48
  synthetic sequence

SEQ ID NO: 113 - protein, 275 aa, Artificial sequence; identical to SEQ ID NO: 46
  synthetic sequence

SEQ ID NO: 114 - protein, 276 aa, Artificial sequence
  synthetic sequence
GSHSMRYFFTSVSRPGRGEPRFIAVGYVDDTQFVRFDSDAASQRMEPRAPWIEQEGPEYWDGETRKVKAHSQTHRVDLGTLRGCYNQSEAGSHTVQRMYGCDVGSDWRFLRGYHQYAYDGKDYIALKEDLRSWTAADMCAQTTKHKWEAAHVAEQLRAYLEGTCVEWLRRYLENGKETLQRTDAPKTHMTHHAVSDHEATLRCWALSFYPAEITLTWQRDGEDQTQDTELVETRPAGDGTFQKWAAVVVPSGQEQRYTCHVQHEGLPKPLTLRWEP

SEQ ID NO: 115 - protein, 275 aa, Artificial sequence
  synthetic sequence
GSHSMRYFYTSVSRPGRGEPRFIAVGYVDDTQFVRFDSDAASQRMEPRAPWIEQEGPEYWDQETRNVKAQSQTDRVDLGTLRGYYNQSEDGSHTIQIMYGCDVGPDGRFLRGYRQDAYDGKDYIALNEDLRSWTAADMAAQITKRKWEAAHAAEQQRAYLEGTCVEWLRRYLENGKETLQRTDPPKTHMTHHPISDHEATLRCWALGFYPAEITLTWQRDGEDQTQDTELVETRPAGDGTFQKWAAVVVPSGEEQRYTCHVQHEGLPKPLTLRWE

SEQ ID NO: 116 - protein, 275 aa, Artificial sequence
  synthetic sequence
GSHSMRYFYTSVSRPGRGEPRFIAVGYVDDTQFVRFDSDAASQRMEPRAPWIEQEGPEYWDQETRNVKAQSQTDRVDLGTLRGAYNQSEDGSHTIQIMYGCDVGPDGRFLRGYRQDAYDGKDYIALNEDLRSWTAADMAAQITKRKWEAAHAAEQQRAYLEGTCVEWLRRYLENGKETLQRTDPPKTHMTHHPISDHEATLRCWALGFYPAEITLTWQRDGEDQTQDTELVETRPCGDGTFQKWAAVVVPSGEEQRYTCHVQHEGLPKPLTLRWE

SEQ ID NO: 117 - protein, 341 aa, Artificial sequence
  synthetic sequence
GSHSMRYFSTSVSRPGRGEPRFIAVGYVDDTQFVRFDSDAASQRMEPRAPWIEQEGPEYWDEETGKVKAHSQTDRENLRIALRYYNQSEAGSHTLQMMFGCDVGSDGRFLRGYHQYAYDGKDYIALKEDLRSWTAADMAAQITKRKWEAAHVAEQQRAYLEGTCVDGLRRYLENGKETLQRTDPPKTHMTHHPISDHEATLRCWALGFYPAEITLTWQRDGEDQTQDTELVETRPAGDGTFQKWAAVVVPSGEEQRYTCHVQHEGLPKPLTLRWEPSSQPTVPIVGIIAGLVLLGAVITGAVVAAVMWRRNSSDRKGGSYSQAASSDSAQGSDVSLTACKV

SEQ ID NO: 118 - protein, 341 aa, Artificial sequence
  synthetic sequence
GSHSMRYFTTSVSRPGRGEPRFIAVGYVDDTQFVRFDSDAASQRMEPRAPWIEQEGPEYWDRNTRNVKAHSQIDRVDLGTLRGYYNQSEAGSHTIQMMYGCDVGSDGRFLRGYQQDAYDGKDYIALNEDLRSWTAADMAAQITQRKWEAARVAEQLRAYLEGTCVEWLRRYLENGKETLQRTDPPKTHMTHHAVSDHEATLRCWALSFYPAEITLTWQRDGEDQTQDTELVETRPAGDGTFQKWASVVVPSGQEQRYTCHVQHEGLPKPLTLRWEPSSQPTIPIVGIIAGLVLFGAVFAGAVVAAVRWRRKSSDRKGGSYSQAASSDSAQGSDMSLTACKV

SEQ ID NO: 119 - protein, 276 aa, Artificial sequence [sequence omitted]

SEQ ID NO: 120 - protein, 276 aa, Artificial sequence
  synthetic sequence
GSHSMRYFYTSVSRPGRGEPRFISVGYVDDTQFVRFDSDAASPREEPRAPWIEQEGPEYWDRNTQIYKAQAQTDRESLRNLRGAYNQSEAGSHTLQSMYGCDVGPDGRLLRGHDQYAYDGKDYIALNEDLRSWTAADTAAQITQRKWEAAREAEQRRAYLEGECVEWLRRYLENGKDKLERADPPKTHVTHHPISDHEATLRCWALGFYPAEITLTWQRDGEDQTQDTELVETRPCGDRTFQKWAAVVVPSGEEQRYTCHVQHEGLPKPLTLRWEP

SEQ ID NO: 121 - protein, 276 aa, Artificial sequence; identical to SEQ ID NO: 120
  synthetic sequence

SEQ ID NO: 122 - protein, 276 aa, Artificial sequence
  synthetic sequence
GSHSMRYFYTSVSRPGRGEPRFISVGYVDDTQFVRFDSDAASPREEPRAPWIEQEGPEYWDRNTQIYKAQAQTDRESLRNLRGCYNQSEAGSHTLQSMYGCDVGPDGRLLRGHDQYAYDGKDYIALNEDLRSWTAADTCAQITQRKWEAAREAEQRRAYLEGECVEWLRRYLENGKDKLERADPPKTHVTHHPISDHEATLRCWALGFYPAEITLTWQRDGEDQTQDTELVETRPAGDRTFQKWAAVVVPSGEEQRYTCHVQHEGLPKPLTLRWEP

SEQ ID NO: 123 - protein, 276 aa, Artificial sequence; identical to SEQ ID NO: 75
  synthetic sequence

SEQ ID NO: 124 - protein, 276 aa, Artificial sequence
  synthetic sequence
CSHSMRYFDTAVSRPGRGEPRFISVGYVDDTQFVRFDSDAASPRGEPRAPWVEQEGPEYWDRETQNYKRQAQADRVSLRNLRGAYNQSEDGSHTLQRMYGCDLGPDGRLLRGYDQSAYDGKDYIALNEDLRSWTAADTAAQITQRKLEAARAAEQLRAYLEGTCVEWLRRYLENGKETLQRAEPPKTHVTHHPLSDHEATLRCWALGFYPAEITLTWQRDGEDQTQDTELVETRPCGDGTFQKWAAVVVPSGQEQRYTCHMQHEGLQEPLTLSWEP

SEQ ID NO: 125 - protein, 276 aa, Artificial sequence
  synthetic sequence
CSHSMRYFDTAVSRPGRGEPRFISVGYVDDTQFVRFDSDAASPRGEPRAPWVEQEGPEYWDRETQNYKRQAQADRVSLRNLRGCYNQSEDGSHTLQRMYGCDLGPDGRLLRGYDQSAYDGKDYIALNEDLRSWTAADTCAQITQRKLEAARAAEQLRAYLEGTCVEWLRRYLENGKETLQRAEPPKTHVTHHPLSDHEATLRCWALGFYPAEITLTWQRDGEDQTQDTELVETRPAGDGTFQKWAAVVVPSGQEQRYTCHMQHEGLQEPLTLSWEP

SEQ ID NO: 126 - protein, 99 aa, Artificial sequence
  synthetic sequence
IQRTPKIQVYSCHPAENGKSNFLNCYVSGFHPSDIEVDLLKNGERIEKVEHSDLSFSKDWSFYLLYYTEFTPTEKDEYACRVNHVTLSQPKIVKWDRDM

SEQ ID NO: 127 - protein, 246 aa, Artificial sequence
  synthetic sequence
  MISC_FEATURE (78)..(79): 1-5 amino acid residues are present between the residues, wherein the amino acid residues are i) selected independently from any naturally occurring (e.g., encoded) amino acid or ii) any naturally occurring amino acid except proline or glycine
  MISC_FEATURE (79)..(80): 1-5 amino acid residues are present between the residues, wherein the amino acid residues are i) selected independently from any naturally occurring (e.g., encoded) amino acid or ii) any naturally occurring amino acid except proline or glycine
  MISC_FEATURE (123)..(124): 1-5 amino acid residues are present between the residues, wherein the amino acid residues are i) selected independently from any naturally occurring (e.g., encoded) amino acid or ii) any naturally occurring amino acid except proline or glycine
  MISC_FEATURE (124)..(125): 1-5 amino acid residues are present between the residues, wherein the amino acid residues are i) selected independently from any naturally occurring (e.g., encoded) amino acid or ii) any naturally occurring amino acid except proline or glycine
  MISC_FEATURE (210)..(211): 1-5 amino acid residues are present between the residues, wherein the amino acid residues are i) selected independently from any naturally occurring (e.g., encoded) amino acid or ii) any naturally occurring amino acid except proline or glycine
  MISC_FEATURE (211)..(212): 1-5 amino acid residues are present between the residues, wherein the amino acid residues are i) selected independently from any naturally occurring (e.g., encoded) amino acid or ii) any naturally occurring amino acid except proline or glycine
GSHSMRYFFTSVSRPGRGEPRFIAVGYVDDTQFVRFDSDAASQRMEPRAPWIEQEGPEYWDGETRKVKAHSQTHRVDLCAGSHTVQRMYGCDVGSDWRFLRGYHQYAYDGKDYIALKEDLRSWCHKWEAAHVAEQLRAYLEGTCVEWLRRYLENGKETLQRTDAPKTHMTHHAVSDHEATLRCWALSFYPAEITLTWQRDGEDQTQDTELCQKWAAVVVPSGQEQRYTCHVQHEGLPKPLTLRWEP

SEQ ID NO: 128 - protein, 99 aa, Artificial sequence [sequence omitted]

SEQ ID NO: 129 - protein, 99 aa, Artificial sequence; identical to SEQ ID NO: 126
  synthetic sequence

SEQ ID NO: 130 - protein, 276 aa, Artificial sequence [sequence omitted]

SEQ ID NO: 131 - protein, 276 aa, Artificial sequence
  synthetic sequence
GSHSMRYFFTSVSRPGRGEPRFIAVGYVDDTQFVRFDSDAASQRMEPRAPWIEQEGPEYWDGETRKVKAHSQTHRVDLGTLRGYYNQSEAGSHTVQRMYGCDVGSDWRFLRGYHQYAYDGKDYIALKEDLRSWTAADMAAQTTKHKWEAAHVAEQLRAYLEGTCVEWLRRYLENGKETLQRTDAPKTHMTHHAVSDHEATLRCWALSFYPAEITLTWQRDGEDQTQDTELVETRPCGDGTFQKWAAVVVPSGQEQRYTCHVQHEGLPKPLTLRWEP

SEQ ID NO: 132 - protein, 275 aa, Artificial sequence; identical to SEQ ID NO: 46
  synthetic sequence

SEQ ID NO: 133 - protein, 99 aa, Artificial sequence; identical to SEQ ID NO: 126
  synthetic sequence

SEQ ID NO: 134 - protein, 276 aa, Artificial sequence; identical to SEQ ID NO: 131
  synthetic sequence

SEQ ID NO: 135 - protein, 99 aa, Artificial sequence; identical to SEQ ID NO: 126
  synthetic sequence

SEQ ID NO: 136 - protein, 10 aa, Artificial sequence
  synthetic sequence
  MISC_FEATURE (1)..(5): The residues may be repeated 1, 2, 3, 4, 5, 6, 7, 8, or 9 times
GCGGSGGGGS

SEQ ID NO: 137 - protein, 20 aa, Artificial sequence
  synthetic sequence
GCGGSGGGGSGGGGSGGGGS

SEQ ID NO: 138 - protein, 15 aa, Artificial sequence
  synthetic sequence
GCGGSGGGGSGGGGS

SEQ ID NO: 139 - protein, 5 aa, Artificial sequence
  synthetic sequence
GCGGS

SEQ ID NO: 140 - protein, 10 aa, Artificial sequence
  synthetic sequence
  MISC_FEATURE (6)..(10): The residues may be repated 1, 2, 3, 4, 5, 6, 7, 8, 9, or 10 times
GCGGSGGGGS

SEQ ID NO: 141 - protein, 5 aa, Artificial sequence
  synthetic sequence
CGGGS

SEQ ID NO: 142 - protein, 10 aa, Artificial sequence
  synthetic sequence
  MISC_FEATURE (6)..(10): The residues may be repeated 1,2,3,4,5,6,7,8,9, or 10 times
CGGGSGGGGS

SEQ ID NO: 143 - protein, 276 aa, Artificial sequence
  synthetic sequence
GSHSMRYFFTSVSRPGRGEPRFIAVGYVDDTQFVRFDSDAASQRMEPRAPWIEQEGPEYWDGETRKVKAHSQTHRVDLGTLRGCYNQSEAGSHTVQRMYGCDVGSDWRFLRGYHQYAYDGKDYIALKEDLRSWTAADMAAQTTKHKWEAAHVAEQLRAYLEGTCVEWLRRYLENGKETLQRTDAPKTHMTHHAVSDHEATLRCWALSFYPAEITLTWQRDGEDQTQDTELVETRPCGDGTFQKWAAVVVPSGQEQRYTCHVQHEGLPKPLTLRWEP

SEQ ID NO: 144 - protein, 99 aa, Artificial sequence; identical to SEQ ID NO: 126
  synthetic sequence

SEQ ID NO: 145 - protein, 275 aa, Artificial sequence
  synthetic sequence
GSHSMRYFFTSVSRPGRGEPRFIAVGYVDDTQFVRFDSDAASQKMEPRAPWIEQEGPEYWDQETRNMKAHSQTDRANLGTLRGCYNQSEDGSHTIQIMYGCDVGPDGRFLRGYRQDAYDGKDYIALNEDLRSWTAADMAAQITKRKWEAVHAAEQRRVYLEGRCVDGLRRYLENGKETLQRTDPPKTHMTHHPISDHEATLRCWALGFYPAEITLTWQRDGEDQTQDTELVETRPCGDGTFQKWAAVVVPSGEEQRYTCHVQHEGLPKPLTLRWE

SEQ ID NO: 146 - protein, 276 aa, Artificial sequence; identical to SEQ ID NO: 143
  synthetic sequence

SEQ ID NO: 147 - protein, 275 aa, Artificial sequence
  synthetic sequence
GSHSMRYFFTSVSRPGRGEPRFIAVGYVDDTQFVRFDSDAASQRMEPRAPWIEQEGPEYWDGETRKVKAHSQTHRVDLGTLRGCYNQSEAGSHTVQRMYGCDVGSDWRFLRGYHQYAYDGKDYIALKEDLRSWTAADMAAQTTKHKWEAAHVAEQLRAYLEGTCVEWLRRYLENGKETLQRTDAPKTHMTHHAVSDHEATLRCWALSFYPAEITLTWQRDGEDQTQDTELVETRPCGDGTFQKWAAVVVPSGQEQRYTCHVQHEGLPKPLTLRWE

SEQ ID NO: 148 - protein, 275 aa, Artificial sequence
  synthetic sequence
GSHSMRYFYTSVSRPGRGEPRFIAVGYVDDTQFVRFDSDAASQRMEPRAPWIEQEGPEYWDQETRNVKAQSQTDRVDLGTLRGCYNQSEDGSHTIQIMYGCDVGPDGRFLRGYRQDAYDGKDYIALNEDLRSWTAADMAAQITKRKWEAAHAAEQQRAYLEGRCVEWLRRYLENGKETLQRTDPPKTHMTHHPISDHEATLRCWALGFYPAEITLTWQRDGEDQTQDTELVETRPCGDGTFQKWAAVVVPSGEEQRYTCHVQHEGLPKPLTLRWE

SEQ ID NO: 149 - protein, 275 aa, Artificial sequence
  synthetic sequence
GSHSMRYFSTSVSRPGRGEPRFIAVGYVDDTQFVRFDSDAASQRMEPRAPWIEQEGPEYWDEETGKVKAHSQTDRENLRIALRCYNQSEAGSHTLQMMFGCDVGSDGRFLRGYHQYAYDGKDYIALKEDLRSWTAADMAAQITQRKWEAARVAEQLRAYLEGTCVDGLRRYLENGKETLQRTDPPKTHMTHHPISDHEATLRCWALGFYPAEITLTWQRDGEDQTQDTELVETRPCGDGTFQKWAAVVVPSGEEQRYTCHVQHEGLPKPLTLRWE

SEQ ID NO: 150 - protein, 275 aa, Artificial sequence
  synthetic sequence
GSHSMRYFSTSVSRPGRGEPRFIAVGYVDDTQFVRFDSDAASQRMEPRAPWIEQEGPEYWDEETGKVKAHSQTDRENLRIALRCYNQSEAGSHTLQMMFGCDVGSDGRFLRGYHQYAYDGKDYIALKEDLRSWTAADMAAQITKRKWEAAHVAEQQRAYLEGTCVDGLRRYLENGKETLQRTDPPKTHMTHHPISDHEATLRCWALGFYPAEITLTWQRDGEDQTQDTELVETRPCGDGTFQKWAAVVVPSGEEQRYTCHVQHEGLPKPLTLRWE

SEQ ID NO: 151 - protein, 275 aa, Artificial sequence
  synthetic sequence
GSHSMRYFSTSVSRPGRGEPRFIAVGYVDDTQFVRFDSDAASQRMEPRAPWIEQEGPEYWDEETGKVKAQSQTDRENLRIALRCYNQSEAGSHTLQMMFGCDVGSDGRFLRGYHQYAYDGKDYIALKEDLRSWTAADMAAQITKRKWEAAHVAEQQRAYLEGTCVDGLRRYLENGKETLQRTDPPKTHMTHHPISDHEATLRCWALGFYPAEITLTWQRDGEDQTQDTELVETRPCGDGTFQKWAAVVVPSGEEQRYTCHVQHEGLPKPLTLRWE

SEQ ID NO: 152 - protein, 275 aa, Artificial sequence
  synthetic sequence
GSHSMRYFTTSVSRPGRGEPRFIAVGYVDDTQFVRFDSDAASQRMEPRAPWIEQEGPEYWDRNTRNVKAHSQIDRVDLGTLRGCYNQSEAGSHTIQMMYGCDVGSDGRFLRGYQQDAYDGKDYIALNEDLRSWTAADMAAQITQRKWEAARVAEQLRAYLEGTCVEWLRRYLENGKETLQRTDPPKTHMTHHAVSDHEATLRCWALSFYPAEITLTWQRDGEDQTQDTELVETRPCGDGTFQKWASVVVPSGQEQRYTCHVQHEGLPKPLTLRWE

SEQ ID NO: 153 - protein, 275 aa, Artificial sequence
  synthetic sequence
GSHSMRYFYTSVSRPGRGEPRFIAVGYVDDTQFVRFDSDAASQRMEPRAPWIEQEGPEYWDRNTRKVKAQSQTDRVDLGTLRGCYNQSEDGSHTIQRMYGCDVGPDGRFLRGYQQDAYDGKDYIALNEDLRSWTAADMAAQITQRKWETAHEAEQWRAYLEGTCVEWLRRYLENGKETLQRTDAPKTHMTHHAVSDHEATLRCWALSFYPAEITLTWQRDGEDQTQDTELVETRPCGDGTFQKWASVVVPSGQEQRYTCHVQHEGLPKPLTLRWE

SEQ ID NO: 154 - protein, 276 aa, Artificial sequence
  synthetic sequence
GSHSMRYFYTSVSRPGRGEPRFISVGYVDDTQFVRFDSDAASPREEPRAPWIEQEGPEYWDRNTQIYKAQAQTDRESLRNLRGCYNQSEAGSHTLQSMYGCDVGPDGRLLRGHDQYAYDGKDYIALNEDLRSWTAADTAAQITQRKWEAAREAEQRRAYLEGECVEWLRRYLENGKDKLERADPPKTHVTHHPISDHEATLRCWALGFYPAEITLTWQRDGEDQTQDTELVETRPCGDRTFQKWAAVVVPSGEEQRYTCHVQHEGLPKPLTLRWEP

SEQ ID NO: 155 - protein, 99 aa, Artificial sequence; identical to SEQ ID NO: 126
  synthetic sequence

SEQ ID NO: 156 - protein, 275 aa, Artificial sequence
  synthetic sequence
GSHSMRYFYTSVSRPGRGEPRFISVGYVDDTQFVRFDSDAASPREEPRAPWIEQEGPEYWDRNTQIYKAQAQTDRESLRNLRGCYNQSEAGSHTLQSMYGCDVGPDGRLLRGHDQYAYDGKDYIALNEDLRSWTAADTAAQITQRKWEAAREAEQRRAYLEGECVEWLRRYLENGKDKLERADPPKTHVTHHPISDHEATLRCWALGFYPAEITLTWQRDGEDQTQDTELVETRPCGDRTFQKWAAVVVPSGEEQRYTCHVQHEGLPKPLTLRWE

SEQ ID NO: 157 - protein, 275 aa, Artificial sequence
  synthetic sequence
GSHSMRYFDTAMSRPGRGEPRFISVGYVDDTQFVRFDSDAASPREEPRAPWIEQEGPEYWDRNTQIFKTNTQTDRESLRNLRGCYNQSEAGSHTLQSMYGCDVGPDGRLLRGHNQYAYDGKDYIALNEDLRSWTAADTAAQITQRKWEAARVAEQDRAYLEGTCVEWLRRYLENGKDTLERADPPKTHVTHHPISDHEATLRCWALGFYPAEITLTWQRDGEDQTQDTELVETRPCGDRTFQKWAAVVVPSGEEQRYTCHVQHEGLPKPLTLRWE

SEQ ID NO: 158 - protein, 275 aa, Artificial sequence
  synthetic sequence
GSHSMRYFYTAMSRPGRGEPRFIAVGYVDDTQFVRFDSDAASPRMAPRAPWIEQEGPEYWDRNTQISKTNTQTYRESLRNLRGCYNQSEAGSHIIQRMYGCDVGPDGRLLRGYDQSAYDGKDYIALNEDLSSWTAADTAAQITQRKWEAAREAEQLRAYLEGLCVEWLRRYLENGKETLQRADPPKTHVTHHPISDHEATLRCWALGFYPAEITLTWQRDGEDQTQDTELVETRPCGDRTFQKWAAVVVPSGEEQRYTCHVQHEGLPKPLTLRWE

SEQ ID NO: 159 - protein, 275 aa, Artificial sequence
  synthetic sequence
GSHSMRYFYTSVSRPGRGEPRFISVGYVDDTQFVRFDSDAASPREEPRAPWIEQEGPEYWDRNTQICKTNTQTYRENLRTALRCYNQSEAGSHTLQRMYGCDVGPDGRLLRGHNQFAYDGKDYIALNEDLSSWTAADTAAQITQRKWEAARVAEQLRTYLEGTCVEWLRRYLENGKETLQRADPPKTHVTHHPISDHEATLRCWALGFYPAEITLTWQRDGEDQTQDTELVETRPCGDRTFQKWAAVVVPSGEEQRYTCHVQHEGLPKPLTLRWE

SEQ ID NO: 160 - protein, 275 aa, Artificial sequence
  synthetic sequence
GSHSMRYFHTAMSRPGRGEPRFITVGYVDDTLFVRFDSDATSPRKEPRAPWIEQEGPEYWDRETQISKTNTQTYRESLRNLRGCYNQSEAGSHTLQRMYGCDVGPDGRLLRGHNQYAYDGKDYIALNEDLRSWTAADTAAQISQRKLEAARVAEQLRAYLEGECVEWLRRYLENGKDKLERADPPKTHVTHHPISDHEATLRCWALGFYPAEITLTWQRDGEDQTQDTELVETRPCGDRTFQKWAAVVVPSGEEQRYTCHVQHEGLPKPLTLRWE

SEQ ID NO: 161 - protein, 275 aa, Artificial sequence
  synthetic sequence
GSHSMRYFYTAMSRPGRGEPRFIAVGYVDDTQFVRFDSDAASPRMAPRAPWIEQEGPEYWDRETQKYKRQAQTDRVSLRNLRGCYNQSEAGSHTLQRMYGCDVGPDGRLLRGHDQSAYDGKDYIALNEDLSSWTAADTAAQITQRKWEAAREAEQWRAYLEGLCVEWLRRYLENGKETLQRADPPKTHVTHHPISDHEATLRCWALGFYPAEITLTWQRDGEDQTQDTELVETRPCGDRTFQKWAAVVVPSGEEQRYTCHVQHEGLPKPLTLRWE

SEQ ID NO: 162 - protein, 275 aa, Artificial sequence
  synthetic sequence
GSHSMRYFYTAMSRPGRGEPRFIAVGYVDDTQFVRFDSDAASPRTEPRAPWIEQEGPEYWDRNTQIFKTNTQTYRENLRIALRCYNQSEAGSHIIQRMYGCDLGPDGRLLRGHDQSAYDGKDYIALNEDLSSWTAADTAAQITQRKWEAARVAEQLRAYLEGLCVEWLRRYLENGKETLQRADPPKTHVTHHPVSDHEATLRCWALGFYPAEITLTWQRDGEDQTQDTELVETRPCGDRTFQKWAAVVVPSGEEQRYTCHVQHEGLPKPLTLRWE

SEQ ID NO: 163 - protein, 276 aa, Artificial sequence
  synthetic sequence
CSHSMRYFDTAVSRPGRGEPRFISVGYVDDTQFVRFDSDAASPRGEPRAPWVEQEGPEYWDRETQNYKRQAQADRVSLRNLRGCYNQSEDGSHTLQRMYGCDLGPDGRLLRGYDQSAYDGKDYIALNEDLRSWTAADTAAQITQRKLEAARAAEQLRAYLEGTCVEWLRRYLENGKETLQRAEPPKTHVTHHPLSDHEATLRCWALGFYPAEITLTWQRDGEDQTQDTELVETRPCGDGTFQKWAAVVVPSGQEQRYTCHMQHEGLQEPLTLSWEP

SEQ ID NO: 164 - protein, 99 aa, Artificial sequence; identical to SEQ ID NO: 126
  synthetic sequence

SEQ ID NO: 165 - protein, 276 aa, Artificial sequence
  synthetic sequence
CSHSMKYFFTSVSRPGRGEPRFISVGYVDDTQFVRFDSDAASPRGEPRAPWVEQEGPEYWDRETQKYKRQAQTDRVSLRNLRGCYNQSEAGSHTLQWMCGCDLGPDGRLLRGYDQYAYDGKDYIALNEDLRSWTAADTAAQITQRKWEAAREAEQRRAYLEGTCVEWLRRYLENGKETLQRAEHPKTHVTHHPVSDHEATLRCWALGFYPAEITLTWQWDGEDQTQDTELVETRPCGDGTFQKWAAVMVPSGEEQRYTCHVQHEGLPEPLTLRWEP

SEQ ID NO: 166 - protein, 276 aa, Artificial sequence
  synthetic sequence
GSHSMRYFYTAVSRPGRGEPHFIAVGYVDDTQFVRFDSDAASPRGEPRAPWVEQEGPEYWDRETQKYKRQAQTDRVSLRNLRGCYNQSEARSHIIQRMYGCDVGPDGRLLRGYDQYAYDGKDYIALNEDLRSWTAADTAAQITQRKWEAAREAEQLRAYLEGLCVEWLRRYLKNGKETLQRAEHPKTHVTHHPVSDHEATLRCWALGFYPAEITLTWQWDGEDQTQDTELVETRPCGDGTFQKWAAVVVPSGEEQRYTCHVQHEGLPEPLTLRWEP

SEQ ID NO: 167 - protein, 276 aa, Artificial sequence
  synthetic sequence
GSHSMRYFYTAVSRPGRGEPHFIAVGYVDDTQFVRFDSDAASPRGEPRAPWVEQEGPEYWDRETQKYKRQAQTDRVSLRNLRGCYNQSEAGSHIIQRMYGCDVGPDGRLLRGYDQYAYDGKDYIALNEDLRSWTAADTAAQITQRKWEAAREAEQLRAYLEGLCVEWLRRYLKNGKETLQRAEHPKTHVTHHPVSDHEATLRCWALGFYPAEITLTWQWDGEDQTQDTELVETRPCGDGTFQKWAAVVVPSGEEQRYTCHVQHEGLPEPLTLRWEP

SEQ ID NO: 168 - protein, 276 aa, Artificial sequence
  synthetic sequence
GSHSMRYFSTSVSWPGRGEPRFIAVGYVDDTQFVRFDSDAASPRGEPREPWVEQEGPEYWDRETQKYKRQAQADRVNLRKLRGCYNQSEDGSHTLQRMFGCDLGPDGRLLRGYNQFAYDGKDYIALNEDLRSWTAADTAAQITQRKWEAAREAEQRRAYLEGTCVEWLRRYLENGKETLQRAEHPKTHVTHHPVSDHEATLRCWALGFYPAEITLTWQWDGEDQTQDTELVETRPCGDGTFQKWAAVVVPSGEEQRYTCHVQHEGLPEPLTLRWKP

SEQ ID NO: 169 - protein, 276 aa, Artificial sequence
  synthetic sequence
CSHSMRYFDTAVSRPGRGEPRFISVGYVDDTQFVRFDSDAASPRGEPRAPWVEQEGPEYWDRETQKYKRQAQADRVNLRKLRGCYNQSEDGSHTLQWMYGCDLGPDGRLLRGYDQSAYDGKDYIALNEDLRSWTAADTAAQITQRKWEAAREAEQWRAYLEGTCVEWLRRYLENGKETLQRAEHPKTHVTHHPVSDHEATLRCWALGFYPAEITLTWQRDGEDQTQDTELVETRPCGDGTFQKWAAVVVPSGEEQRYTCHVQHEGLPEPLTLRWEP

SEQ ID NO: 170 - protein, 276 aa, Artificial sequence; identical to SEQ ID NO: 163
  synthetic sequence

SEQ ID NO: 171 - protein, 276 aa, Artificial sequence
  synthetic sequence
CSHSMRYFDTAVSRPGRGEPRFISVGYVDDTQFVRFDSDAASPRGEPRAPWVEQEGPEYWDRETQKYKRQAQADRVSLRNLRGCYNQSEDGSHTLQRMSGCDLGPDGRLLRGYDQSAYDGKDYIALNEDLRSWTAADTAAQITQRKLEAARAAEQLRAYLEGTCVEWLRRYLENGKETLQRAEPPKTHVTHHPLSDHEATLRCWALGFYPAEITLTWQRDGEDQTQDTELVETRPCGDGTFQKWAAVVVPSGQEQRYTCHMQHEGLQEPLTLSWEP

SEQ ID NO: 172 - protein, 276 aa, Artificial sequence
  synthetic sequence
CSHSMRYFYTAVSRPGRGEPRFIAVGYVDDTQFVQFDSDAASPRGEPRAPWVEQEGPEYWDRETQKYKRQAQTDRVSLRNLRGCYNQSEAGSHTLQRMYGCDLGPDGRLLRGYNQFAYDGKDYIALNEDLRSWTAADTAAQITQRKWEAARTAEQLRAYLEGTCVEWLRRYLENGKKTLQRAEHPKTHVTHHPVSDHEATLRCWALGFYPAEITLTWQRDGEDQTQDTELVETRPCGDGTFQKWAAVVVPSGEEQRYTCHVQHEGLPEPLTLRWGP

SEQ ID NO: 173 - protein, 276 aa, Artificial sequence
  synthetic sequence
CSHSMRYFYTAVSRPGRGEPHFIAVGYVDDTQFVRFDSDAASPRGEPRAPWVEQEGPEYWDRETQNYKRQAQTDRVNLRKLRGCYNQSEAGSHIIQRMYGCDLGPDGRLLRGHDQLAYDGKDYIALNEDLRSWTAADTAAQITQRKWEAAREAEQLRAYLEGTCVEWLRRYLENGKETLQRAEHPKTHVTHHPVSDHEATLRCWALGFYPAEITLTWQRDGEDQTQDTELVETRPCGDGTFQKWAAVVVPSGEEQRYTCHVQHEGLPEPLTLRWEP

SEQ ID NO: 174 - protein, 5 aa, Artificial sequence
  synthetic sequence
  misc_feature (4)..(4): Xaa can be any naturally occurring amino acid other than proline
VPGXG

SEQ ID NO: 175 - protein, 223 aa, Artificial sequence
  synthetic sequence
PPCPSCPAPEFLGGPSVFLFPPKPKDTLMISRTPEVTCVVVDVSQEDPEVQFNWYVDGVEVHNAKTKPREEQFNSTYRVVSVLTVLHQDWLNGKEYKCKVSNKGLPSSIEKTISKAKGQPREPQVYTLPPSQEEMTKNQVSLTCLVKGFYPSDIAVEWESNGQPENNYKTTPPVLDSDGSFFLYSRLTVDKSRWQEGNVFSCSVMHEALHNHYTQKSLSLSPG

SEQ ID NO: 176 - protein, 586 aa, Artificial sequence
  synthetic sequence
LAGETGQEAAPLDGVLANPPNISSLSPRQLLGFPCAEVSGLSTERVRELAVALAQKNVKLSTEQLRCLAHRLSEPPEDLDALPLDLLLFLNPDAFSGPQACTRFFSRITKANVDLLPRGAPERQRLLPAALACWGVRGSLLSEADVRALGGLACDLPGRFVAESAEVLLPRLVSCPGPLDQDQQEAARAALQGGGPPYGPPSTWSVSTMDALRGLLPVLGQPIIRSIPQGIVAAWRQRSSRDPSWRQPERTILRPRFRREVEKTACPSGKKAREIDESLIFYKKWELEACVDAALLATQMDRVNAIPFTYEQLDVLKHKLDELYPQGYPESVIQHLGYLFLKMSPEDIRKWNVTSLETLKALLEVNKGHEMSPQVATLIDRFVKGRGQLDKDTLDTLTAFYPGYLCSLSPEELSSVPPSSIWAVRPQDLDTCDPRQLDVLYPKARLAFQNMNGSEYFVKIQSFLGGAPTEDLKALSQQNVSMDLATFMKLRTDAVLPLTVAEVQKLLGPHVEGLKAEERHRPVRDWILRQRQDDLDTLGLGLQGGIPNGYLVLDLSMQEALSGTPCLLGPGPVLTVLALLLASTLA

SEQ ID NO: 177 - protein, 10 aa, Artificial sequence
  synthetic sequence
AFYPGYLCSL

SEQ ID NO: 178 - protein, 9 aa, Artificial sequence
  synthetic sequence
VLPLTVAEV

SEQ ID NO: 179 - protein, 9 aa, Artificial sequence
  synthetic sequence
ELAVALAQK

SEQ ID NO: 180 - protein, 9 aa, Artificial sequence
  synthetic sequence
ALQGGGPPY

SEQ ID NO: 181 - protein, 9 aa, Artificial sequence
  synthetic sequence
FYPGYLCSL

SEQ ID NO: 182 - protein, 9 aa, Artificial sequence
  synthetic sequence
LYPKARLAF

SEQ ID NO: 183 - protein, 15 aa, Artificial sequence
  synthetic sequence
LLFLLFSLGWVGPSR

SEQ ID NO: 184 - protein, 15 aa, Artificial sequence
  synthetic sequence
VNKGHEMSPQAPRRP

SEQ ID NO: 185 - protein, 15 aa, Artificial sequence
  synthetic sequence
FMKLRTDAVLPLTVA

SEQ ID NO: 186 - protein, 10 aa, Artificial sequence
  synthetic sequence
DAALLATQMD

SEQ ID NO: 187 - protein, 1055 aa, Artificial sequence
  synthetic sequence
MELAALCRWGLLLALLPPGAASTQVCTGTDMKLRLPASPETHLDMLRHLYQGCQVVQGNLELTYLPTNASLSFLQDIQEVQGYVLIAHNQVRQVPLQRLRIVRGTQLFEDNYALAVLDNGDPLNNTTPVTGASPGGLRELQLRSLTEILKGGVLIQRNPQLCYQDTILWKDIFHKNNQLALTLIDTNRSRACHPCSPMCKGSRCWGESSEDCQSLTRTVCAGGCARCKGPLPTDCCHEQCAAGCTGPKHSDCLACLHFNHSGICELHCPALVTYNTDTFESMPNPEGRYTFGASCVTACPYNYLSTDVGSCTLVCPLHNQEVTAEDGTQRCEKCSKPCARVCYGLGMEHLREVRAVTSANIQEFAGCKKIFGSLAFLPESFDGDPASNTAPLQPEQLQVFETLEEITGYLYISAWPDSLPDLSVFQNLQVIRGRILHNGAYSLTLQGLGISWLGLRSLRELGSGLALIHHNTHLCFVHTVPWDQLFRNPHQALLHTANRPEDECVGEGLACHQLCARGHCWGPGPTQCVNCSQFLRGQECVEECRVLQGLPREYVNARHCLPCHPECQPQNGSVTCFGPEADQCVACAHYKDPPFCVARCPSGVKPDLSYMPIWKFPDEEGACQPCPINCTHSCVDLDDKGCPAEQRASPLTSIISAVVGILLVVVLGVVFGILIKRRQQKIRKYTMRRLLQETELVEPLTPSGAMPNQAQMRILKETELRKVKVLGSGAFGTVYKGIWIPDGENVKIPVAIKVLRENTSPKANKEILDEAYVMAGVGSPYVSRLLGICLTSTVQLVTQLMPYGCLLDHVRENRGRLGSQDLLNWCMQIAKGMSYLEDVRLVHRDLAARNVLVKSPNHVKITDFGLARLLDIDETEYHADGGKVPIKWMALESILRRRFTHQSDVWSYGVTVWELMTFGAKPYDGIPAREIPDLLEKGERLPQPPICTIDVYMIMVKCWMIDSECRPRFRELVSEFSRMARDPQRFVVIQNEDLGPASPLDSTFYRSLLEDDDMGDLVDAEEYLVPQQGFFCPDPAPGAGGMVHHRHRSSSTRNM

SEQ ID NO: 188 - protein, 184 aa, Artificial sequence [sequence omitted]

SEQ ID NO: 189 - protein, 502 aa, Artificial sequence
  synthetic sequence
MDFLLLQDPASTCVPEPASQHTLRSGPGCLQQPEQQGVRDPGGIWAKLGAAEASAERLQGRRSRGASGSEPQQMGSDVRDLNALLPAVPSLGGGGGCALPVSGAAQWAPVLDFAPPGASAYGSLGGPAPPPAPPPPPPPPPHSFIKQEPSWGGAEPHEEQCLSAFTVHFSGQFTGTAGACRYGPFGPPPPSQASSGQARMFPNAPYLPSCLESQPAIRNQGYSTVTFDGTPSYGHTPSHHAAQFPNHSFKHEDPMGQQGSLGEQQYSVPPPVYGCHTPTDSCTGSQALLLRTPYSSDNLYQMTSQLECMTWNQMNLGATLKGHSTGYESDNHTTPILCGAQYRIHTHGVFRGIQDVRRVPGVAPTLVRSASETSEKRPFMCAYPGCNKRYFKLSHLQMHSRKHTGEKPYQCDFKDCERRFSRSDQLKRHQRRHTGVKPFQCKTCQRKFSRSDHLKTHTRTHTGEKPFSCRWPSCQKKFARSDELVRHHNMHQRNMTKLQLAL

SEQ ID NO: 190 - protein, 9 aa, Artificial sequence
  synthetic sequence
RMFPNAPYL

SEQ ID NO: 191 - protein, 8 aa, Artificial sequence
  synthetic sequence
CMTWNQMN

SEQ ID NO: 192 - protein, 9 aa, Artificial sequence
  synthetic sequence
CYTWNQMNL

SEQ ID NO: 193 - protein, 15 aa, Artificial sequence
  synthetic sequence
CMTWNQMNLGATLKG

SEQ ID NO: 194 - protein, 15 aa, Artificial sequence
  synthetic sequence
WNQMNLGATLKGVAA

SEQ ID NO: 195 - protein, 15 aa, Artificial sequence
  synthetic sequence
CMTWNYMNLGATLKG

SEQ ID NO: 196 - protein, 15 aa, Artificial sequence
  synthetic sequence
WNYMNLGATLKGVAA

SEQ ID NO: 197 - protein, 15 aa, Artificial sequence
  synthetic sequence
MTWNQMNLGATLKGV

SEQ ID NO: 198 - protein, 15 aa, Artificial sequence
  synthetic sequence
TWNQMNLGATLKGVA

SEQ ID NO: 199 - protein, 15 aa, Artificial sequence
  synthetic sequence
CMTWNLMNLGATLKG

SEQ ID NO: 200 - protein, 15 aa, Artificial sequence
  synthetic sequence
MTWNLMNLGATLKGV

SEQ ID NO: 201 - protein, 15 aa, Artificial sequence
  synthetic sequence
TWNLMNLGATLKGVA

SEQ ID NO: 202 - protein, 15 aa, Artificial sequence
  synthetic sequence
WNLMNLGATLKGVAA

SEQ ID NO: 203 - protein, 8 aa, Artificial sequence
  synthetic sequence
MNLGATLK

SEQ ID NO: 204 - protein, 15 aa, Artificial sequence
  synthetic sequence
MTWNYMNLGATLKGV

SEQ ID NO: 205 - protein, 15 aa, Artificial sequence
  synthetic sequence
TWNYMNLGATLKGVA

SEQ ID NO: 206 - protein, 17 aa, Artificial sequence
  synthetic sequence
CMTWNQMNLGATLKGVA

SEQ ID NO: 207 - protein, 17 aa, Artificial sequence
  synthetic sequence
CMTWNLMNLGATLKGVA

SEQ ID NO: 208 - protein, 17 aa, Artificial sequence
  synthetic sequence
CMTWNYMNLGATLKGVA

SEQ ID NO: 209 - protein, 9 aa, Artificial sequence
  synthetic sequence
GYLRNPTAC

SEQ ID NO: 210 - protein, 9 aa, Artificial sequence
  synthetic sequence
GALRNPTAL

SEQ ID NO: 211 - protein, 9 aa, Artificial sequence
  synthetic sequence
YALRNPTAC

SEQ ID NO: 212 - protein, 9 aa, Artificial sequence
  synthetic sequence
GLLRNPTAC

SEQ ID NO: 213 - protein, 9 aa, Artificial sequence
  synthetic sequence
RYRPHPGAL

SEQ ID NO: 214 - protein, 9 aa, Artificial sequence
  synthetic sequence
YQRPHPGAL

SEQ ID NO: 215 - protein, 9 aa, Artificial sequence
  synthetic sequence
RLRPHPGAL

SEQ ID NO: 216 - protein, 9 aa, Artificial sequence
  synthetic sequence
RIRPHPGAL

SEQ ID NO: 217 - protein, 15 aa, Artificial sequence
  synthetic sequence
QFPNHSFKHEDPMGQ

SEQ ID NO: 218 - protein, 9 aa, Artificial sequence
  synthetic sequence
HSFKHEDPY

SEQ ID NO: 219 - protein, 13 aa, Artificial sequence
  synthetic sequence
QFPNHSFKHEDPM

SEQ ID NO: 220 - protein, 13 aa, Artificial sequence
  synthetic sequence
QFPNHSFKHEDPY

SEQ ID NO: 221 - protein, 13 aa, Artificial sequence
  synthetic sequence
KRPFMCAYPGCNK

SEQ ID NO: 222 - protein, 13 aa, Artificial sequence
  synthetic sequence
KRPFMCAYPGCYK

SEQ ID NO: 223 - protein, 9 aa, Artificial sequence
  synthetic sequence
FMCAYPGCY

SEQ ID NO: 224 - protein, 9 aa, Artificial sequence
  synthetic sequence
FMCAYPGCK

SEQ ID NO: 225 - protein, 15 aa, Artificial sequence
  synthetic sequence
KRPFMCAYPGCNKRY

SEQ ID NO: 226 - protein, 15 aa, Artificial sequence
  synthetic sequence
SEKRPFMCAYPGCNK

SEQ ID NO: 227 - protein, 15 aa, Artificial sequence
  synthetic sequence
KRPFMCAYPGCYKRY

SEQ ID NO: 228 - protein, 9 aa, Artificial sequence
  synthetic sequence
NLMNLGATL

SEQ ID NO: 229 - protein, 9 aa, Artificial sequence
  synthetic sequence
NYMNLGATL

SEQ ID NO: 230 - protein, 9 aa, Artificial sequence
  synthetic sequence
KLPQLCTEL

SEQ ID NO: 231 - protein, 9 aa, Artificial sequence
  synthetic sequence
LQTTIHDII

SEQ ID NO: 232 - protein, 9 aa, Artificial sequence
  synthetic sequence
VYDFAFRDL

SEQ ID NO: 233 - protein, 9 aa, Artificial sequence
  synthetic sequence
FAFRDLCIV

SEQ ID NO: 234 - protein, 9 aa, Artificial sequence
  synthetic sequence
KFYSKISEY

SEQ ID NO: 235 - protein, 9 aa, Artificial sequence
  synthetic sequence
ISEYRHYCY

SEQ ID NO: 236 - protein, 9 aa, Artificial sequence
  synthetic sequence
TLHEYMLDL

SEQ ID NO: 237 - protein, 9 aa, Artificial sequence
  synthetic sequence
YMLDLQPET

SEQ ID NO: 238 - protein, 9 aa, Artificial sequence
  synthetic sequence
QAEPDRAHY

SEQ ID NO: 239 - protein, 9 aa, Artificial sequence
  synthetic sequence
RAHYNIVTF

SEQ ID NO: 240 - protein, 9 aa, Artificial sequence
  synthetic sequence
CDSTLRLCV

SEQ ID NO: 241 - protein, 10 aa, Artificial sequence
  synthetic sequence
LCVQSTHVDI

SEQ ID NO: 242 - protein, 9 aa, Artificial sequence
  synthetic sequence
LLMGTLGIV

SEQ ID NO: 243 - protein, 8 aa, Artificial sequence
  synthetic sequence
TLGIVCPI

SEQ ID NO: 244 - protein, 12 aa, Artificial sequence
  synthetic sequence
LLMGTLGIVCPI

SEQ ID NO: 245 - protein, 261 aa, Artificial sequence
  synthetic sequence
MAVTACQGLGFVVSLIGIAGIIAATCMDQWSTQDLYNNPVTAVFNYQGLWRSCVRESSGFTECRGYFTLLGLPAMLQAVRALMIVGIVLGAIGLLVSIFALKCIRIGSMEDSAKANMTLTSGIMFIVSGLCAIAGVSVFANMLVTNFWMSTANMYTGMGGMVQTVQTRYTFGAALFVGWVAGGLTLIGGVMMCIACRGLAPEETNYKAVSYHASGHSVAYKPGGFKASTGFGSNTKNKKIYDGGARTEDEVQSYPSKHDYV

SEQ ID NO: 246 - protein, 15 aa, Artificial sequence
  synthetic sequence
TEDEVQSYPSKHDYV

SEQ ID NO: 247 - protein, 12 aa, Artificial sequence
  synthetic sequence
EVQSYPSKHDYV

SEQ ID NO: 248 - protein, 214 aa, Artificial sequence
  synthetic sequence
DIQMTQSPSSLSASVGDRVTITCRASQDVNTAVAWYQQKPGKAPKLLIYSASFLYSGVPSRFSGSRSGTDFTLTISSLQPEDFATYYCQQHYTTPPTFGQGTKVEIKRTVAAPSVFIFPPSDEQLKSGTASVVCLLNNFYPREAKVQWKVDNALQSGNSQESVTEQDSKDSTYSLSSTLTLSKADYEKHKVYACEVTHQGLSSPVTKSFNRGEC

SEQ ID NO: 249 - protein, 450 aa, Artificial sequence
  synthetic sequence
EVQLVESGGGLVQPGGSLRLSCAASGFNIKDTYIHWVRQAPGKGLEWVARIYPTNGYTRYADSVKGRFTISADTSKNTAYLQMNSLRAEDTAVYYCSRWGGDGFYAMDYWGQGTLVTVSSASTKGPSVFPLAPSSKSTSGGTAALGCLVKDYFPEPVTVSWNSGALTSGVHTFPAVLQSSGLYSLSSVVTVPSSSLGTQTYICNVNHKPSNTKVDKKVEPKSCDKTHTCPPCPAPELLGGPSVFLFPPKPKDTLMISRTPEVTCVVVDVSHEDPEVKFNWYVDGVEVHNAKTKPREEQYNSTYRVVSVLTVLHQDWLNGKEYKCKVSNKALPAPIEKTISKAKGQPREPQVYTLPPSREEMTKNQVSLTCLVKGFYPSDIAVEWESNGQPENNYKTTPPVLDSDGSFFLYSKLTVDKSRWQQGNVFSCSVMHEALHNHYTQKSLSLSPGK

SEQ ID NO: 250 - protein, 107 aa, Artificial sequence [sequence omitted]

SEQ ID NO: 251 - protein, 120 aa, Artificial sequence [sequence omitted]

SEQ ID NO: 252 - protein, 120 aa, Artificial sequence [sequence omitted]

SEQ ID NO: 253 - protein, 107 aa, Artificial sequence [sequence omitted]

SEQ ID NO: 254 - protein, 5 aa, Artificial sequence
  synthetic sequence
  MISC_FEATURE (1)..(5): The residues may be repeated 1, 2, 3, 4, 5, 6, 7, 8, 9, or 10 times.
GGGGS

SEQ ID NO: 255 - protein, 11 aa, Artificial sequence
  synthetic sequence
RASQDVNTAVA

SEQ ID NO: 256 - protein, 6 aa, Artificial sequence
  synthetic sequence
SASFLY

SEQ ID NO: 257 - protein, 8 aa, Artificial sequence
  synthetic sequence
QQHYTTPP

SEQ ID NO: 258 - protein, 8 aa, Artificial sequence
  synthetic sequence
GFNIKDTY

SEQ ID NO: 259 - protein, 8 aa, Artificial sequence
  synthetic sequence
IYPTNGYT

SEQ ID NO: 260 - protein, 13 aa, Artificial sequence
  synthetic sequence
SRWGGDGFYAMDY

SEQ ID NO: 261 - protein, 242 aa, Artificial sequence
  synthetic sequence
EVQLVESGGGLVQPGGSLRLSCAASGFNIKDTYIHWVRQAPGKGLEWVARIYPTNGYTRYADSVKGRFTISADTSKNTAYLQMNSLRAEDTAVYYCSRWGGDGFYAMDYWGQGTLVTVSSGGGGSGGGGSGGGGSDIQMTQSPSSLSASVGDRVTITCRASQDVNTAVAWYQQKPGKAPKLLIYSASFLYSGVPSRFSGSRSGTDFTLTISSLQPEDFATYYCQQHYTTPPTFGQGTKVEIK

SEQ ID NO: 262 - protein, 214 aa, Artificial sequence
  synthetic sequence
DIQMTQSPSSLSASVGDRVTITCKASQDVSIGVAWYQQKPGKAPKLLIYSASYRYTGVPSRFSGSGSGTDFTLTISSLQPEDFATYYCQQYYIYPYTFGQGTKVEIKRTVAAPSVFIFPPSDEQLKSGTASVVCLLNNFYPREAKVQWKVDNALQSGNSQESVTEQDSKDSTYSLSSTLTLSKADYEKHKVYACEVTHQGLSSPVTKSFNRGEC

SEQ ID NO: 263 - protein, 448 aa, Artificial sequence
  synthetic sequence
EVQLVESGGGLVQPGGSLRLSCAASGFTFTDYTMDWVRQAPGKGLEWVADVNPNSGGSIYNQRFKGRFTLSVDRSKNTLYLQMNSLRAEDTAVYYCARNLGPSFYFDYWGQGTLVTVSSASTKGPSVFPLAPSSKSTSGGTAALGCLVKDYFPEPVTVSWNSGALTSGVHTFPAVLQSSGLYSLSSVVTVPSSSLGTQTYICNVNHKPSNTKVDKKVEPKSCDKTHTCPPCPAPELLGGPSVFLFPPKPKDTLMISRTPEVTCVVVDVSHEDPEVKFNWYVDGVEVHNAKTKPREEQYNSTYRVVSVLTVLHQDWLNGKEYKCKVSNKALPAPIEKTISKAKGQPREPQVYTLPPSREEMTKNQVSLTCLVKGFYPSDIAVEWESNGQPENNYKTTPPVLDSDGSFFLYSKLTVDKSRWQQGNVFSCSVMHEALHNHYTQKSLSLSPG

SEQ ID NO: 264 - protein, 107 aa, Artificial sequence [sequence omitted]

SEQ ID NO: 265 - protein, 119 aa, Artificial sequence [sequence omitted]

SEQ ID NO: 266 - protein, 11 aa, Artificial sequence
  synthetic sequence
KASQDVSIGVA

SEQ ID NO: 267 - protein, 6 aa, Artificial sequence
  synthetic sequence
SASYRY

SEQ ID NO: 268 - protein, 8 aa, Artificial sequence
  synthetic sequence
QQYYIYPY

SEQ ID NO: 269 - protein, 10 aa, Artificial sequence
  synthetic sequence
GFTFTDYTMD

SEQ ID NO: 270 - protein, 18 aa, Artificial sequence
  synthetic sequence
ADVNPNSGGSIYNQRFKG

SEQ ID NO: 271 - protein, 12 aa, Artificial sequence
  synthetic sequence
ARNLGPSFYFDY

SEQ ID NO: 272 - protein, 242 aa, Artificial sequence; identical to SEQ ID NO: 261
  synthetic sequence

SEQ ID NO: 273 - protein, 15 aa, Artificial sequence
  synthetic sequence
KASQSVDYDGDSYLN

SEQ ID NO: 274 - protein, 7 aa, Artificial sequence
  synthetic sequence
DASNLVS

SEQ ID NO: 275 - protein, 9 aa, Artificial sequence
  synthetic sequence
QQSTEDPWT

SEQ ID NO: 276 - protein, 5 aa, Artificial sequence
  synthetic sequence
SYWMN

SEQ ID NO: 277 - protein, 17 aa, Artificial sequence
  synthetic sequence
QIWPGDGDTNYNGKFKG

SEQ ID NO: 278 - protein, 15 aa, Artificial sequence
  synthetic sequence
RETTTVGRYYYAMDY

SEQ ID NO: 279 - protein, 15 aa, Artificial sequence
  synthetic sequence
KASQSVDYDGDSYLN

SEQ ID NO: 280 - protein, 7 aa, Artificial sequence
  synthetic sequence
DASNLVS

SEQ ID NO: 281 - protein, 9 aa, Artificial sequence
  synthetic sequence
QQSTEDPWT

SEQ ID NO: 282 - protein, 5 aa, Artificial sequence
  synthetic sequence
SYWMN

SEQ ID NO: 283 - protein, 17 aa, Artificial sequence
  synthetic sequence
QIWPGDGDTNYNGKFKG

SEQ ID NO: 284 - protein, 15 aa, Artificial sequence
  synthetic sequence
RETTTVGRYYYAMDY

SEQ ID NO: 285 - protein, 249 aa, Artificial sequence
  synthetic sequence
DIQLTQSPASLAVSLGQRATISCKASQSVDYDGDSYLNWYQQIPGQPPKLLIYDASNLVSGIPPRFSGSGSGTDFTLNIHPVEKVDAATYHCQQSTEDPWTFGGGTKLEIKGGGGSGGGGSGGGGSQVQLQQSGAELVRPGSSVKISCKASGYAFSSYWMNWVKQRPGQGLEWIGQIWPGDGDTNYNGKFKGKATLTADESSSTAYMQLSSLASEDSAVYFCARRETTTVGRYYYAMDYWGQGTTVTVS

SEQ ID NO: 286 - protein, 217 aa, Artificial sequence
  synthetic sequence
DIALTQPASVSGSPGQSITISCTGTSSDIGGYNSVSWYQQHPGKAPKLMIYGVNNRPSGVSNRFSGSKSGNTASLTISGLQAEDEADYYCSSYDIESATPVFGGGTKLTVLGQPKAAPSVTLFPPSSEELQANKATLVCLISDFYPGAVTVAWKGDSSPVKAGVETTTPSKQSNNKYAASSYLSLTPEQWKSHRSYSCQVTHEGSTVEKTVAPTESS

SEQ ID NO: 287 - protein, 450 aa, Artificial sequence
  synthetic sequence
QVELVQSGAEVKKPGESLKISCKGSGYSFTSYWIGWVRQAPGKGLEWMGIIDPGDSRTRYSPSFQGQVTISADKSISTAYLQWSSLKASDTAMYYCARGQLYGGTYMDGWGQGTLVTVSSASTKGPSVFPLAPSSKSTSGGTAALGCLVKDYFPEPVTVSWNSGALTSGVHTFPAVLQSSGLYSLSSVVTVPSSSLGTQTYICNVNHKPSNTKVDKKVEPKSCDKTHTCPPCPAPELLGGPSVFLFPPKPKDTLMISRTPEVTCVVVDVSHEDPEVKFNWYVDGVEVHNAKTKPREEQYNSTYRVVSVLTVLHQDWLNGKEYKCKVSNKALPAPIEKTISKAKGQPREPQVYTLPPSRDELTKNQVSLTCLVKGFYPSDIAVEWESNGQPENNYKTTPPVLDSDGSFFLYSKLTVDKSRWQQGNVFSCSVMHEALHNHYTQKSLSLSPGK

SEQ ID NO: 288 - protein, 107 aa, Artificial sequence
  synthetic sequence
DIALTQPASVSGSPGQSITISCTGTSSDIGGYNSVSWYQQHPGKAPKLMIYGVNNRPSGVSNRFSGSKSGNTASLTISGLQAEDEADYYCSSYDIESATPVFGGGTK

SEQ ID NO: 289 - protein, 120 aa, Artificial sequence
  synthetic sequence
QVELVQSGAEVKKPGESLKISCKGSGYSFTSYWIGWVRQAPGKGLEWMGIIDPGDSRTRYSPSFQGQVTISADKSISTAYLQWSSLKASDTAMYYCARGQLYGGTYMDGWGQGTLVTVSS

SEQ ID NO: 290 - protein, 14 aa, Artificial sequence
  synthetic sequence
TGTSSDIGGYNSVS

SEQ ID NO: 291 - protein, 11 aa, Artificial sequence
  synthetic sequence
LMIYGVNNRPS

SEQ ID NO: 292 - protein, 10 aa, Artificial sequence
  synthetic sequence
SSYDIESATP

SEQ ID NO: 293 - protein, 10 aa, Artificial sequence
  synthetic sequence
GYSFTSYWIG

SEQ ID NO: 294 - protein, 16 aa, Artificial sequence
  synthetic sequence
WMGIIDPGDSRTRYSP

SEQ ID NO: 295 - protein, 11 aa, Artificial sequence
  synthetic sequence
GQLYGGTYMDG

SEQ ID NO: 296 - protein, 244 aa, Artificial sequence
  synthetic sequence
QVQLQQSGAEVKKPGASVKVSCKASGYTFTGYYMHWVRQAPGQGLEWMGRINPNSGGTNYAQKFQGRVTMTRDTSISTAYMELSRLRSEDTAVYYCARGRYYGMDVWGQGTMVTVSSGGGGSGGGGSGGGGSGGGGSEIVLTQSPATLSLSPGERATISCRASQSVSSNFAWYQQRPGQAPRLLIYDASNRATGIPPRFSGSGSGTDFTLTISSLEPEDFAAYYCHQRSNWLYTFGQGTKVDIK

SEQ ID NO: 297 - protein, 253 aa, Artificial sequence
  synthetic sequence
QVQLVQSGAEVKKPGASVKVSCKASGYTFTGYYMHWVRQAPGQGLEWMGWINPNSGGTNYAQKFQGRVTMTRDTSISTAYMELSRLRSDDTAVYYCARDLRRTVVTPRAYYGMDVWGQGTTVTVSSGGGGSGGGGSGGGGSGGGGSDIQLTQSPSTLSASVGDRVTITCQASQDISNSLNWYQQKAGKAPKLLIYDASTLETGVPSRFSGSGSGTDFSFTISSLQPEDIATYYCQQHDNLPLTFGQGTKVEIK

SEQ ID NO: 298 - protein, 217 aa, Artificial sequence
  synthetic sequence
QSVLTQPPSASGTPGQRVTISCSGSSSNIGSNTVNWYQQLPGTAPKLLIFNYHQRPSGVPDRFSGSKSGSSASLAISGLQSEDEADYYCAAWDDSLNGWVFGGGTKLTVLGQPKAAPSVTLFPPSSEELQANKATLVCLISDFYPGAVTVAWKADSSPVKAGVETTTPDSKQSNNKYAASSYLSLTPEQWKSHRSYSCQVTHEGSTVEKTVAPTECS

SEQ ID NO: 299 - protein, 453 aa, Artificial sequence
  synthetic sequence
EVQLVESGGGLVKPGGSLRLSCAASGFTFGDYALSWFRQAPGKGLEWVGVSRSKAYGGTTDYAASVKGRFTISRDDSKSTAYLQMNSLKTEDTAVYYCASSGYSSGWTPFDYWGQGTLVTVSSASTKGPSVFPLAPSSKSTSGGTAALGCLVKDYFPEPVTVSWNSGALTSGVHTFPAVLQSSGLYSLSSVVTVPSSSLGTQTYICNVNHKPSNTKVDKKVEPKSCDKTHTCPPCPAPELLGGPSVFLFPPKPKDTLMISRTPEVTCVVVDVSHEDPEVKFNWYVDGVEVHNAKTKPREEQYNSTYRVVSVLTVLHQDWLNGKEYKCKVSNKALPAPIEKTISKAKGQPREPQVYTLPPSREEMTKNQVSLTCLVKGFYPSDIAVEWESNGQPENNYKTTPPVLDSDGSFFLYSKLTVDKSRWQQGNVFSCSVMHEALHNHYTQKSLSLSPGK

SEQ ID NO: 300 - protein, 111 aa, Artificial sequence
  synthetic sequence
QSVLTQPPSASGTPGQRVTISCSGSSSNIGSNTVNWYQQLPGTAPKLLIFNYHQRPSGVPDRFSGSKSGSSASLAISGLQSEDEADYYCAAWDDSLNGWVFGGGTKLTVLG

SEQ ID NO: 301 - protein, 131 aa, Artificial sequence
  synthetic sequence
EVQLVESGGGLVKPGGSLRLSCAASGFTFGDYALSWFRQAPGKGLEWVGVSRSKAYGGTTDYAASVKGRFTISRDDSKSTAYLQMNSLKTEDTAVYYCASSGYSSGWTPFDYWGQGTLVTVSSASTKGPSV

SEQ ID NO: 302 - protein, 8 aa, Artificial sequence
  synthetic sequence
SSNIGSNT

SEQ ID NO: 303 - protein, 11 aa, Artificial sequence
  synthetic sequence
AAWDDSLNGWV

SEQ ID NO: 304 - protein, 8 aa, Artificial sequence
  synthetic sequence
GFTFGDYA

SEQ ID NO: 305 - protein, 10 aa, Artificial sequence
  synthetic sequence
SRSKAYGGTT

SEQ ID NO: 306 - protein, 14 aa, Artificial sequence
  synthetic sequence
ASSGYSSGWTPFDY

SEQ ID NO: 307 - protein, 249 aa, Artificial sequence
  synthetic sequence
QVQLVQSGAEVKKPGSSVKVSCKASGGTFSNYWMHWVRQAPGQGLEWMGATYRGHSDTYYNQKFKGRVTITADKSTSTAYMELSSLRSEDTAVYYCARGAIYNGYDVLDNWGQGTLVTVSSGGGGSGGGGSGGGGSGGGGSDIQMTQSPSSLSASVGDRVTITCSASQDISNYLNWYQQKPGKAPKLLIYYTSNLHSGVPSRFSGSGSGTDFTLTISSLQPEDFATYYCQQYRKLPWTFGQGTKLEIKR

SEQ ID NO: 308 - protein, 249 aa, Artificial sequence
  synthetic sequence
DIQMTQSPSSLSASVGDRVTITCSASQDISNYLNWYQQKPGKAPKLLIYYTSNLHSGVPSRFSGSGSGTDFTLTISSLQPEDFATYYCQQYRKLPWTFGQGTKLEIKRGGGGSGGGGSGGGGSGGGGSQVQLVQSGAEVKKPGSSVKVSCKASGGTFSNYWMHWVRQAPGQGLEWMGATYRGHSDTYYNQKFKGRVTITADKSTSTAYMELSSLRSEDTAVYYCARGAIYNGYDVLDNWGQGTLVTVSS

SEQ ID NO: 309 - protein, 11 aa, Artificial sequence
  synthetic sequence
SASQDISNYLN

SEQ ID NO: 310 - protein, 7 aa, Artificial sequence
  synthetic sequence
YTSNLHS

SEQ ID NO: 311 - protein, 9 aa, Artificial sequence
  synthetic sequence
QQYRKLPWT

SEQ ID NO: 312 - protein, 5 aa, Artificial sequence
  synthetic sequence
NYWMH

SEQ ID NO: 313 - protein, 17 aa, Artificial sequence
  synthetic sequence
ATYRGHSDTYYNQKFKG

SEQ ID NO: 314 - protein, 12 aa, Artificial sequence
  synthetic sequence
GAIYNGYDVLDN

SEQ ID NO: 315 - protein, 108 aa, Artificial sequence
  synthetic sequence
DIQMTQSPSSLSASVGDRVTITCSASQDISNYLNWYQQKPGKAPKLLIYYTSNLHSGVPSRFSGSGSGTDFTLTISSLQPEDFATYYCQQYRKLPWTFGQGTKLEIKR

SEQ ID NO: 316 - protein, 121 aa, Artificial sequence
  synthetic sequence
QVQLVQSGAEVKKPGSSVKVSCKASGGTFSNYWMHWVRQAPGQGLEWMGATYRGHSDTYYNQKFKGRVTITADKSTSTAYMELSSLRSEDTAVYYCARGAIYDGYDVLDNWGQGTLVTVSS

SEQ ID NO: 317 - protein, 108 aa, Artificial sequence; identical to SEQ ID NO: 315
  synthetic sequence

SEQ ID NO: 318 - protein, 121 aa, Artificial sequence; identical to SEQ ID NO: 316
  synthetic sequence

SEQ ID NO: 319 - protein, 20 aa, Artificial sequence
  synthetic sequence
VTSAPDTRPAPGSTAPPAHG

SEQ ID NO: 320 - protein, 43 aa, Artificial sequence
  synthetic sequence
SNIKFRPGSVVVQLTLAFREGTINVHDVETQFNQYKTEAASRY

SEQ ID NO: 321 - protein, 35 aa, Artificial sequence
  synthetic sequence
SVVVQLTLAFREGTINVHDVETQFNQYKTEAASRY

SEQ ID NO: 322 - protein, 20 aa, Artificial sequence
  synthetic sequence
LAFREGTINVHDVETQFNQY

SEQ ID NO: 323 - protein, 25 aa, Artificial sequence
  synthetic sequence
SNIKFRPGSVVVQLTLAAFREGTIN

SEQ ID NO: 324 - protein, 5 aa, Artificial sequence
  synthetic sequence
RYGMS

SEQ ID NO: 325 - protein, 17 aa, Artificial sequence
  synthetic sequence
TISGGGTYIYYPDSVKG

SEQ ID NO: 326 - protein, 13 aa, Artificial sequence
  synthetic sequence
DNYGRNYDYGMDY

SEQ ID NO: 327 - protein, 10 aa, Artificial sequence
  synthetic sequence
SATSSVSYIH

SEQ ID NO: 328 - protein, 7 aa, Artificial sequence
  synthetic sequence
STSNLAS

SEQ ID NO: 329 - protein, 9 aa, Artificial sequence
  synthetic sequence
QQRSSSPFT

SEQ ID NO: 330 - protein, 5 aa, Artificial sequence
  synthetic sequence
GYAMS

SEQ ID NO: 331 - protein, 17 aa, Artificial sequence
  synthetic sequence
TISSGGTYIYYPDSVKG

SEQ ID NO: 332 - protein, 12 aa, Artificial sequence
  synthetic sequence
LGGDNYYEYFDV

SEQ ID NO: 333 - protein, 15 aa, Artificial sequence
  synthetic sequence
RASKSVSTSGYSYMH

SEQ ID NO: 334 - protein, 7 aa, Artificial sequence
  synthetic sequence
LASNLES

SEQ ID NO: 335 - protein, 9 aa, Artificial sequence
  synthetic sequence
QHSRELPFT

SEQ ID NO: 336 - protein, 5 aa, Artificial sequence
  synthetic sequence
DYAMN

SEQ ID NO: 337 - protein, 17 aa, Artificial sequence
  synthetic sequence
VISTFSGNINFNQKFKG

SEQ ID NO: 338 - protein, 10 aa, Artificial sequence
  synthetic sequence
SDYYGPYFDY

SEQ ID NO: 339 - protein, 16 aa, Artificial sequence
  synthetic sequence
RSSQTIVHSNGNTYLE

SEQ ID NO: 340 - protein, 7 aa, Artificial sequence
  synthetic sequence
KVSNRFS

SEQ ID NO: 341 - protein, 9 aa, Artificial sequence
  synthetic sequence
FQGSHVPFT

SEQ ID NO: 342 - protein, 5 aa, Artificial sequence
  synthetic sequence
GYAMS

SEQ ID NO: 343 - protein, 17 aa, Artificial sequence
  synthetic sequence
TISSGGTYIYYPDSVKG

SEQ ID NO: 344 - protein, 9 aa, Artificial sequence
  synthetic sequence
LGGDNYYEY

SEQ ID NO: 345 - protein, 15 aa, Artificial sequence
  synthetic sequence
TASKSVSTSGYSYMH

SEQ ID NO: 346 - protein, 7 aa, Artificial sequence
  synthetic sequence
LVSNLES

SEQ ID NO: 347 - protein, 10 aa, Artificial sequence
  synthetic sequence
QHIRELTRSE

SEQ ID NO: 348 - protein, 8 aa, Artificial sequence
  synthetic sequence
GFTFSNYY

SEQ ID NO: 349 - protein, 8 aa, Artificial sequence
  synthetic sequence
ISGRGSTI

SEQ ID NO: 350 - protein, 10 aa, Artificial sequence
  synthetic sequence
VKDRGGYSPY

SEQ ID NO: 351 - protein, 6 aa, Artificial sequence
  synthetic sequence
QSISTY

SEQ ID NO: 352 - protein, 10 aa, Artificial sequence
  synthetic sequence
QQSYSTPPIT

SEQ ID NO: 353 - protein, 115 aa, Artificial sequence
  synthetic sequence
MQEVTQIPAALSVPEGENLVLNCSFTDSAIYNLQWFRQDPGKGLTSLLLIQSSQREQTSGRLNASLDKSSGRSTLYIAASQPGDSATYLCAVRPTSGGSYIPTFGRGTSLIVHPY

SEQ ID NO: 354 - protein, 112 aa, Artificial sequence
  synthetic sequence
MGVTQTPKFQVLKTGQSMTLQCAQDMNHEYMSWYRQDPGMGLRLIHYSVGAGITDQGEVPNGYNVSRSTTEDFPLRLLSAAPSQTSVYFCASSYVGNTGELFFGEGSRLTVL

SEQ ID NO: 355 - protein, 115 aa, Artificial sequence
  synthetic sequence
MQEVTQIPAALSVPEGENLVLNCSFTDSAIYNLQWFRQDPGKGLTSLLLIMSHQREQTSGRLNASLDKSSGRSTLYIAASQPGDSATYLCAVRPTSGGSYIPTFGRGTSLIVHPY

SEQ ID NO: 356 - protein, 112 aa, Artificial sequence
  synthetic sequence
MGVTQTPKFQVLKTGQSMTLQCAQDMNHEYMSWYRQDPGMGLRLIHYSVSAGITDQGEVPNGYNVSRSTTEDFPLRLLSAAPSQTSVYFCASSYVGNTGELFFGEGSRLTVL

SEQ ID NO: 357 - protein, 9 aa, Artificial sequence
  synthetic sequence
YIIFVYIPL

SEQ ID NO: 358 - protein, 9 aa, Artificial sequence
  synthetic sequence
KLPQLCTEL

SEQ ID NO: 359 - protein, 10 aa, Artificial sequence
  synthetic sequence
TIHEIILECV

SEQ ID NO: 360 - protein, 9 aa, Artificial sequence
  synthetic sequence
YMLDLQPET

SEQ ID NO: 361 - protein, 8 aa, Artificial sequence
  synthetic sequence
TLGIVCPI

SEQ ID NO: 362 - protein, 9 aa, Artificial sequence
  synthetic sequence
KCIDFYSRI

SEQ ID NO: 363 - protein, 9 aa, Artificial sequence
  synthetic sequence
FQQLFLNTL

SEQ ID NO: 364 - protein, 132 aa, Artificial sequence
  synthetic sequence
METLLGLLILQLQLQWVSSKQEVTQIPAALSVPEGENLVLNCSFTDSAIYNLQWFRQDPGKGLTSLLLIQSSQREQTSGRLNASLDKSSGRSTLYIAASQPGDSATYLCAVRETSGSRLTFGEGTQLTVNPD

SEQ ID NO: 365 - protein, 133 aa, Artificial sequence
  synthetic sequence
MGIRLLCRVAFCFLAVGLVDVKVTQSSRYLVKRTGEKVFLECVQDMDHENMFWYRQDPGLGLRLIYFSYDVKMKEKGDIPEGYSVSREKKERFSLILESASTNQTSMYLCASSFWGRSTDTQYFGPGTRLTVL

SEQ ID NO: 366 - protein, 5 aa, Artificial sequence
  synthetic sequence
  MISC_FEATURE (1)..(5): The residues may be repeated
GSGGS

SEQ ID NO: 367 - protein, 4 aa, Artificial sequence
  synthetic sequence
  MISC_FEATURE (1)..(4): The residues may be repeated
GGGS

SEQ ID NO: 368 - protein, 4 aa, Artificial sequence
  synthetic sequence
GGSG

SEQ ID NO: 369 - protein, 5 aa, Artificial sequence
  synthetic sequence
GGSGG

SEQ ID NO: 370 - protein, 5 aa, Artificial sequence
  synthetic sequence
GSGSG

SEQ ID NO: 371 - protein, 5 aa, Artificial sequence
  synthetic sequence
GSGGG

SEQ ID NO: 372 - protein, 5 aa, Artificial sequence
  synthetic sequence
GGGSG

SEQ ID NO: 373 - protein, 5 aa, Artificial sequence
  synthetic sequence
GSSSG

SEQ ID NO: 374 - protein, 5 aa, Artificial sequence
  synthetic sequence
  MISC_FEATURE (2)..(5): The residues may be repeated 1, 2, 3, 4, 5, 6, 7, 8, 9, or 10 times.
GSSSS

SEQ ID NO: 375 - protein, 20 aa, Artificial sequence
  synthetic sequence
GSSSSGSSSSGSSSSGSSSS

SEQ ID NO: 376 - protein, 25 aa, Artificial sequence
  synthetic sequence
GSSSSGSSSSGSSSSGSSSSGSSSS

SEQ ID NO: 377 - protein, 5 aa, Artificial sequence
  synthetic sequence
GGGGS

SEQ ID NO: 378 - protein, 10 aa, Artificial sequence
  synthetic sequence
GGGGSGGGGS

SEQ ID NO: 379 - protein, 15 aa, Artificial sequence
  synthetic sequence
GGGGSGGGGSGGGGS

SEQ ID NO: 380 - protein, 20 aa, Artificial sequence
  synthetic sequence
GGGGSGGGGSGGGGSGGGGS

SEQ ID NO: 381 - protein, 25 aa, Artificial sequence
  synthetic sequence
GGGGSGGGGSGGGGSGGGGSGGGGS

SEQ ID NO: 382 - protein, 30 aa, Artificial sequence
  synthetic sequence
GGGGSGGGGSGGGGSGGGGSGGGGSGGGGS

SEQ ID NO: 383 - protein, 35 aa, Artificial sequence
  synthetic sequence
GGGGSGGGGSGGGGSGGGGSGGGGSGGGGSGGGGS

SEQ ID NO: 384 - protein, 40 aa, Artificial sequence
  synthetic sequence
GGGGSGGGGSGGGGSGGGGSGGGGSGGGGSGGGGSGGGGS

SEQ ID NO: 385 - protein, 45 aa, Artificial sequence
  synthetic sequence
GGGGSGGGGSGGGGSGGGGSGGGGSGGGGSGGGGSGGGGSGGGGS

SEQ ID NO: 386 - protein, 50 aa, Artificial sequence
  synthetic sequence
GGGGSGGGGSGGGGSGGGGSGGGGSGGGGSGGGGSGGGGSGGGGSGGGGS

SEQ ID NO: 387 - protein, 5 aa, Artificial sequence
  synthetic sequence
AAAGG

SEQ ID NO: 388 - protein, 15 aa, Artificial sequence
  synthetic sequence
GCGGSGGGGSGGGGS

SEQ ID NO: 389 - protein, 10 aa, Artificial sequence
  synthetic sequence
  MISC_FEATURE (6)..(10): The residues may be repeated 1, 2, 3, 4, 5, 6, 7, 8, or 9 times.
GCGGSGGGGS

SEQ ID NO: 390 - protein, 20 aa, Artificial sequence
  synthetic sequence
GCGGSGGGGSGGGGSGGGGS

SEQ ID NO: 391 - protein, 15 aa, Artificial sequence
  synthetic sequence
GCGGSGGGGSGGGGS

SEQ ID NO: 392 - protein, 561 aa, Artificial sequence
  synthetic sequence
MESRGRRCPEMISVLGPISGHVLKAVFSRGDTPVLPHETRLLQTGIHVRVSQPSLILVSQYTPDSTPCHRGDNQLQVQHTYFTGSEVENVSVNVHNPTGRSICPSQEPMSIYVYALPLKMLNIPSINVHHYPSAAERKHRHLPVADAVIHASGKQMWQARLTVSGLAWTRQQNQWKEPDVYYTSAFVFPTKDVALRHVVCAHELVCSMENTRATKMQVIGDQYVKVYLESFCEDVPSGKLFMHVTLGSDVEEDLTMTRNPQPFMRPHERNGFTVLCPKNMIIKPGKISHIMLDVAFTSHEHFGLLCPKSIPGLSISGNLLMNGQQIFLEVQAIRETVELRQYDPVAALFFFDIDLLLQRGPQYSEHPTFTSQYRIQGKLEYRHTWDRHDEGAAQGDDDVWTSGSDSDEELVTTERKTPRVTGGGAMAGASTSAGRKRKSASSATACTSGVMTRGRLKAESTVAPEEDTDEDSDNEIHNPAVFTWPPWQAGILARNLVPMVATVQGQNLKYQEFFWDANDIYRIFAELEGVWQPAAQPKRRRHRQDALPGPCIASTPKKHRG

SEQ ID NO: 393 - protein, 9 aa, Artificial sequence
  synthetic sequence
NLVPMVATV

SEQ ID NO: 394 - protein, 906 aa, Artificial sequence
  synthetic sequence
MESRIWCLVVCVNLCIVCLGAAVSSSSTSHATSSTHNGSHTSRTTSAQTRSVYSQHVTSSEAVSHRANETIYNTTLKYGDVVGVNTTKYPYRVCSMAQGTDLIRFERNIICTSMKPINEDLDEGIMVVYKRNIVAHTFKVRVYQKVLTFRRSYAYIYTTYLLGSNTEYVAPPMWEIHHINKFAQCYSSYSRVIGGTVFVAYHRDSYENKTMQLIPDDYSNTHSTRYVTVKDQWHSRGSTWLYRETCNLNCMLTITTARSKYPYHFFATSTGDVVYISPFYNGTNRNASYFGENADKFFIFPNYTIVSDFGRPNAAPETHRLVAFLERADSVISWDIQDEKNVTCQLTFWEASERTIRSEAEDSYHFSSAKMTATFLSKKQEVNMSDSALDCVRDEAINKLQQIFNTSYNQTYEKYGNVSVFETSGGLVVFWQGIKQKSLVELERLANRSSLNITHRTRRSTSDNNTTHLSSMESVHNLVYAQLQFTYDTLRGYINRALAQIAEAWCVDQRRTLEVFKELSKINPSAILSAIYNKPIAARFMGDVLGLASCVTINQTSVKVLRDMNVKESPGRCYSRPVVIFNFANSSYVQYGQLGEDNEILLGNHRTEECQLPSLKIFIAGNSAYEYVDYLFKRMIDLSSISTVDSMIALDIDPLENTDFRVLELYSQKELRSSNVFDLEEIMREFNSYKQRVKYVEDKVVDPLPPYLKGLDDLMSGLGAAGKAVGVAIGAVGGAVASVVEGVATFLKNPFGAFTIILVAIAVVIITYLIYTRQRRLCTQPLQNLFPYLVSADGTTVTSGSTKDTSLQAPPSYEESVYNSGRKGPGPPSSDASTAAPPYTNEQAYQMLLALARLDAEQRAQQNGTDSLDGQTGTQDKGQKPNLLDRLRHRKNGYRHLKDSDEEENV

SEQ ID NO: 395 - protein, 9 aa, Artificial sequence
  synthetic sequence
NLVPMVATV

SEQ ID NO: 396 - protein, 9 aa, Artificial sequence
  synthetic sequence
GILGFVFTL

SEQ ID NO: 397 - protein, 9 aa, Artificial sequence
  synthetic sequence
HPVGEADYF

SEQ ID NO: 398 - protein, 219 aa, Artificial sequence
  synthetic sequence
  MISC_FEATURE (8)..(8): Xaa is any aminoa cid other than Asp.
FTVTVPKXLYVVEYGSNMTIECKFPVEKQLDLAALIVYWEMEDKNIIQFVHGEEDLKVQHSSYRQRARLLKDQLSLGNAALQITDVKLQDAGVYRCMISYGGADYKRITVKVNAPYNKINQRILVVDPVTSEHELTCQAEGYPKAEVIWTSSDHQVLSGKTTTTNSKREEKLFNVTSTLRINTTTNEIFYCTFRRLDPEENHTAELVIPGNILNVSIKI

SEQ ID NO: 399 - protein, 219 aa, Artificial sequence
  synthetic sequence
  MISC_FEATURE (36)..(36): Xaa is any amino acid other than Ile
FTVTVPKDLYVVEYGSNMTIECKFPVEKQLDLAALXVYWEMEDKNIIQFVHGEEDLKVQHSSYRQRARLLKDQLSLGNAALQITDVKLQDAGVYRCMISYGGADYKRITVKVNAPYNKINQRILVVDPVTSEHELTCQAEGYPKAEVIWTSSDHQVLSGKTTTTNSKREEKLFNVTSTLRINTTTNEIFYCTFRRLDPEENHTAELVIPGNILNVSIKI

SEQ ID NO: 400 - protein, 219 aa, Artificial sequence
  synthetic sequence
  misc_feature (54)..(54): Xaa can be any amino acid other than glutamine
FTVTVPKDLYVVEYGSNMTIECKFPVEKQLDLAALIVYWEMEDKNIIQFVHGEXDLKVQHSSYRQRARLLKDQLSLGNAALQITDVKLQDAGVYRCMISYGGADYKRITVKVNAPYNKINQRILVVDPVTSEHELTCQAEGYPKAEVIWTSSDHQVLSGKTTTTNSKREEKLFNVTSTLRINTTTNEIFYCTFRRLDPEENHTAELVIPGNILNVSIKI

SEQ ID NO: 401 - protein, 208 aa, Artificial sequence
  synthetic sequence
  misc_feature (19)..(19): Xaa can be any amino acid other than asparagine
VIHVTKEVKEVATLSCGHXVSVEELAQTRIYWQKEKKMVLTMMSGDMNIWPEYKNRTIFDITNNLSIVILALRPSDEGTYECVVLKYEKDAFKREHLAEVTLSVKADFPTPSISDFEIPTSNIRRIICSTSGGFPEPHLSWLENGEELNAINTTVSQDPETELYAVSSKLDFNMTTNHSFMCLIKYGHLRVNQTFNWNTTKQEHFPDN

SEQ ID NO: 402 - protein, 208 aa, Artificial sequence
  synthetic sequence
  misc_feature (63)..(63): Xaa can be any amino acid other than asparagine
VIHVTKEVKEVATLSCGHNVSVEELAQTRIYWQKEKKMVLTMMSGDMNIWPEYKNRTIFDITXNLSIVILALRPSDEGTYECVVLKYEKDAFKREHLAEVTLSVKADFPTPSISDFEIPTSNIRRIICSTSGGFPEPHLSWLENGEELNAINTTVSQDPETELYAVSSKLDFNMTTNHSFMCLIKYGHLRVNQTFNWNTTKQEHFPDN

SEQ ID NO: 403 - protein, 208 aa, Artificial sequence
  synthetic sequence
  misc_feature (67)..(67): Xaa can be any amino acid other than isoleucine
VIHVTKEVKEVATLSCGHNVSVEELAQTRIYWQKEKKMVLTMMSGDMNIWPEYKNRTIFDITNNLSXVILALRPSDEGTYECVVLKYEKDAFKREHLAEVTLSVKADFPTPSISDFEIPTSNIRRIICSTSGGFPEPHLSWLENGEELNAINTTVSQDPETELYAVSSKLDFNMTTNHSFMCLIKYGHLRVNQTFNWNTTKQEHFPDN

SEQ ID NO: 404 - protein, 208 aa, Artificial sequence
  synthetic sequence
  misc_feature (86)..(86): any amino acid other than lysine
VIHVTKEVKEVATLSCGHNVSVEELAQTRIYWQKEKKMVLTMMSGDMNIWPEYKNRTIFDITNNLSIVILALRPSDEGTYECVVLXYEKDAFKREHLAEVTLSVKADFPTPSISDFEIPTSNIRRIICSTSGGFPEPHLSWLENGEELNAINTTVSQDPETELYAVSSKLDFNMTTNHSFMCLIKYGHLRVNQTFNWNTTKQEHFPDN

SEQ ID NO: 405 - protein, 208 aa, Artificial sequence
  synthetic sequence
  misc_feature (157)..(157): any amino acid other than glutamine
VIHVTKEVKEVATLSCGHNVSVEELAQTRIYWQKEKKMVLTMMSGDMNIWPEYKNRTIFDITNNLSIVILALRPSDEGTYECVVLKYEKDAFKREHLAEVTLSVKADFPTPSISDFEIPTSNIRRIICSTSGGFPEPHLSWLENGEELNAINTTVSXDPETELYAVSSKLDFNMTTNHSFMCLIKYGHLRVNQTFNWNTTKQEHFPDN

SEQ ID NO: 406 - protein, 208 aa, Artificial sequence
  synthetic sequence
  misc_feature (158)..(158): any amino acid other than aspartic acid
VIHVTKEVKEVATLSCGHNVSVEELAQTRIYWQKEKKMVLTMMSGDMNIWPEYKNRTIFDITNNLSIVILALRPSDEGTYECVVLKYEKDAFKREHLAEVTLSVKADFPTPSISDFEIPTSNIRRIICSTSGGFPEPHLSWLENGEELNAINTTVSQXPETELYAVSSKLDFNMTTNHSFMCLIKYGHLRVNQTFNWNTTKQEHFPDN

SEQ ID NO: 407 - protein, 208 aa, Artificial sequence
  synthetic sequence
  misc_feature (25)..(25): Xaa can be any amino acid other than leucine
VIHVTKEVKEVATLSCGHNVSVEEXAQTRIYWQKEKKMVLTMMSGDMNIWPEYKNRTIFDITNNLSIVILALRPSDEGTYECVVLKYEKDAFKREHLAEVTLSVKADFPTPSISDFEIPTSNIRRIICSTSGGFPEPHLSWLENGEELNAINTTVSQDPETELYAVSSKLDFNMTTNHSFMCLIKYGHLRVNQTFNWNTTKQEHFPDN

SEQ ID NO: 408 - protein, 208 aa, Artificial sequence
  synthetic sequence
  misc_feature (31)..(31): Xaa can be any amino acid other than tyrosine
VIHVTKEVKEVATLSCGHNVSVEELAQTRIXWQKEKKMVLTMMSGDMNIWPEYKNRTIFDITNNLSIVILALRPSDEGTYECVVLKYEKDAFKREHLAEVTLSVKADFPTPSISDFEIPTSNIRRIICSTSGGFPEPHLSWLENGEELNAINTTVSQDPETELYAVSSKLDFNMTTNHSFMCLIKYGHLRVNQTFNWNTTKQEHFPDN

SEQ ID NO: 409 - protein, 208 aa, Artificial sequence
  synthetic sequence
  misc_feature (33)..(33): Xaa can be any amino acid other than glutamine
VIHVTKEVKEVATLSCGHNVSVEELAQTRIYWXKEKKMVLTMMSGDMNIWPEYKNRTIFDITNNLSIVILALRPSDEGTYECVVLKYEKDAFKREHLAEVTLSVKADFPTPSISDFEIPTSNIRRIICSTSGGFPEPHLSWLENGEELNAINTTVSQDPETELYAVSSKLDFNMTTNHSFMCLIKYGHLRVNQTFNWNTTKQEHFPDN

SEQ ID NO: 410 - protein, 208 aa, Artificial sequence
  synthetic sequence
  misc_feature (38)..(38): Xaa can be any amino acid other than methionine
VIHVTKEVKEVATLSCGHNVSVEELAQTRIYWQKEKKXVLTMMSGDMNIWPEYKNRTIFDITNNLSIVILALRPSDEGTYECVVLKYEKDAFKREHLAEVTLSVKADFPTPSISDFEIPTSNIRRIICSTSGGFPEPHLSWLENGEELNAINTTVSQDPETELYAVSSKLDFNMTTNHSFMCLIKYGHLRVNQTFNWNTTKQEHFPDN

SEQ ID NO: 411 - protein, 208 aa, Artificial sequence
  synthetic sequence
  misc_feature (39)..(39): Xaa can be any amino acid other than valine
VIHVTKEVKEVATLSCGHNVSVEELAQTRIYWQKEKKMXLTMMSGDMNIWPEYKNRTIFDITNNLSIVILALRPSDEGTYECVVLKYEKDAFKREHLAEVTLSVKADFPTPSISDFEIPTSNIRRIICSTSGGFPEPHLSWLENGEELNAINTTVSQDPETELYAVSSKLDFNMTTNHSFMCLIKYGHLRVNQTFNWNTTKQEHFPDN

SEQ ID NO: 412 - protein, 208 aa, Artificial sequence
  synthetic sequence
  misc_feature (49)..(49): Xaa can be any amino acid other than isoleucine
VIHVTKEVKEVATLSCGHNVSVEELAQTRIYWQKEKKMVLTMMSGDMNXWPEYKNRTIFDITNNLSIVILALRPSDEGTYECVVLKYEKDAFKREHLAEVTLSVKADFPTPSISDFEIPTSNIRRIICSTSGGFPEPHLSWLENGEELNAINTTVSQDPETELYAVSSKLDFNMTTNHSFMCLIKYGHLRVNQTFNWNTTKQEHFPDN

SEQ ID NO: 413 - protein, 208 aa, Artificial sequence
  synthetic sequence
  misc_feature (53)..(53): Xaa can be any amino acid other than aspartic acid
VIHVTKEVKEVATLSCGHNVSVEELAQTRIYWQKEKKMVLTMMSGDMNIWPEXKNRTIFDITNNLSIVILALRPSDEGTYECVVLKYEKDAFKREHLAEVTLSVKADFPTPSISDFEIPTSNIRRIICSTSGGFPEPHLSWLENGEELNAINTTVSQDPETELYAVSSKLDFNMTTNHSFMCLIKYGHLRVNQTFNWNTTKQEHFPDN

SEQ ID NO: 414 - protein, 208 aa, Artificial sequence
  synthetic sequence
  misc_feature (60)..(60): any amino acid other than aspartic acid
VIHVTKEVKEVATLSCGHNVSVEELAQTRIYWQKEKKMVLTMMSGDMNIWPEYKNRTIFXITNNLSIVILALRPSDEGTYECVVLKYEKDAFKREHLAEVTLSVKADFPTPSISDFEIPTSNIRRIICSTSGGFPEPHLSWLENGEELNAINTTVSQDPETELYAVSSKLDFNMTTNHSFMCLIKYGHLRVNQTFNWNTTKQEHFPDN

SEQ ID NO: 415 - protein, 208 aa, Artificial sequence
  synthetic sequence
  misc_feature (108)..(108): Xaa can be any amino acid other than phenylalanine
VIHVTKEVKEVATLSCGHNVSVEELAQTRIYWQKEKKMVLTMMSGDMNIWPEYKNRTIFDITNNLSIVILALRPSDEGTYECVVLKYEKDAFKREHLAEVTLSVKADXPTPSISDFEIPTSNIRRIICSTSGGFPEPHLSWLENGEELNAINTTVSQDPETELYAVSSKLDFNMTTNHSFMCLIKYGHLRVNQTFNWNTTKQEHFPDN

SEQ ID NO: 416 - protein, 208 aa, Artificial sequence
  synthetic sequence
  misc_feature (156)..(156): Xaa can be any amino acid other than serine
VIHVTKEVKEVATLSCGHNVSVEELAQTRIYWQKEKKMVLTMMSGDMNIWPEYKNRTIFDITNNLSIVILALRPSDEGTYECVVLKYEKDAFKREHLAEVTLSVKADFPTPSISDFEIPTSNIRRIICSTSGGFPEPHLSWLENGEELNAINTTVXQDPETELYAVSSKLDFNMTTNHSFMCLIKYGHLRVNQTFNWNTTKQEHFPDN

SEQ ID NO: 417 - protein, 208 aa, Artificial sequence
  synthetic sequence
  misc_feature (111)..(111): Xaa can be any amino acid other than proline
VIHVTKEVKEVATLSCGHNVSVEELAQTRIYWQKEKKMVLTMMSGDMNIWPEYKNRTIFDITNNLSIVILALRPSDEGTYECVVLKYEKDAFKREHLAEVTLSVKADFPTXSISDFEIPTSNIRRIICSTSGGFPEPHLSWLENGEELNAINTTVSQDPETELYAVSSKLDFNMTTNHSFMCLIKYGHLRVNQTFNWNTTKQEHFPDN

SEQ ID NO: 418 - protein, 224 aa, Artificial sequence
  synthetic sequence
  misc_feature (61)..(61): Xaa can be any amino acid other than asparagine
APLKIQAYFNETADLPCQFANSQNQSLSELVVFWQDQENLVLNEVYLGKEKFDSVHSKYMXRTSFDSDSWTLRLHNLQIKDKGLYQCIIHHKKPTGMIRIHQMNSELSVLANFSQPEIVPISNITENVYINLTCSSIHGYPEPKKMSVLLRTKNSTIEYDGIMQKSQDNVTELYDVSISLSVSFPDVTSNMTIFCILETDKTRLLSSPFSIELEDPQPPPDHIP

SEQ ID NO: 419 - protein, 224 aa, Artificial sequence
  synthetic sequence
  misc_feature (66)..(66): Xaa can be any amino acid other than aspartic acid
APLKIQAYFNETADLPCQFANSQNQSLSELVVFWQDQENLVLNEVYLGKEKFDSVHSKYMNRTSFXSDSWTLRLHNLQIKDKGLYQCIIHHKKPTGMIRIHQMNSELSVLANFSQPEIVPISNITENVYINLTCSSIHGYPEPKKMSVLLRTKNSTIEYDGIMQKSQDNVTELYDVSISLSVSFPDVTSNMTIFCILETDKTRLLSSPFSIELEDPQPPPDHIP

SEQ ID NO: 420 - protein, 224 aa, Artificial sequence
  synthetic sequence
  misc_feature (70)..(70): Xaa can be any amino acid other than tryptophan
APLKIQAYFNETADLPCQFANSQNQSLSELVVFWQDQENLVLNEVYLGKEKFDSVHSKYMNRTSFDSDSXTLRLHNLQIKDKGLYQCIIHHKKPTGMIRIHQMNSELSVLANFSQPEIVPISNITENVYINLTCSSIHGYPEPKKMSVLLRTKNSTIEYDGIMQKSQDNVTELYDVSISLSVSFPDVTSNMTIFCILETDKTRLLSSPFSIELEDPQPPPDHIP

SEQ ID NO: 421 - protein, 224 aa, Artificial sequence
  synthetic sequence
  misc_feature (91)..(91): Xaa can be any amino acid other than histidine
APLKIQAYFNETADLPCQFANSQNQSLSELVVFWQDQENLVLNEVYLGKEKFDSVHSKYMNRTSFDSDSWTLRLHNLQIKDKGLYQCIIHXKKPTGMIRIHQMNSELSVLANFSQPEIVPISNITENVYINLTCSSIHGYPEPKKMSVLLRTKNSTIEYDGIMQKSQDNVTELYDVSISLSVSFPDVTSNMTIFCILETDKTRLLSSPFSIELEDPQPPPDHIP

SEQ ID NO: 422 - protein, 110 aa, Artificial sequence
  synthetic sequence
  misc_feature (61)..(61): Xaa can be any amino acid other than asparagine
APLKIQAYFNETADLPCQFANSQNQSLSELVVFWQDQENLVLNEVYLGKEKFDSVHSKYMXRTSFDSDSWTLRLHNLQIKDKGLYQCIIHHKKPTGMIRIHQMNSELSVL

SEQ ID NO: 423 - protein, 110 aa, Artificial sequence
  synthetic sequence
  misc_feature (66)..(66): Xaa can be any amino acid other than aspartic acid
APLKIQAYFNETADLPCQFANSQNQSLSELVVFWQDQENLVLNEVYLGKEKFDSVHSKYMNRTSFXSDSWTLRLHNLQIKDKGLYQCIIHHKKPTGMIRIHQMNSELSVL

SEQ ID NO: 424 - protein, 110 aa, Artificial sequence
  synthetic sequence
  misc_feature (70)..(70): Xaa can be any amino acid other than tryptophan
APLKIQAYFNETADLPCQFANSQNQSLSELVVFWQDQENLVLNEVYLGKEKFDSVHSKYMNRTSFDSDSXTLRLHNLQIKDKGLYQCIIHHKKPTGMIRIHQMNSELSVL

SEQ ID NO: 425 - protein, 110 aa, Artificial sequence
  synthetic sequence
  misc_feature (91)..(91): Xaa can be any amino acid other than histidine
APLKIQAYFNETADLPCQFANSQNQSLSELVVFWQDQENLVLNEVYLGKEKFDSVHSKYMNRTSFDSDSWTLRLHNLQIKDKGLYQCIIHXKKPTGMIRIHQMNSELSVL

SEQ ID NO: 426 - protein, 224 aa, Artificial sequence
  synthetic sequence
  misc_feature (41)..(41): Xaa can be any amino acid other than valine
APLKIQAYFNETADLPCQFANSQNQSLSELVVFWQDQENLXLNEVYLGKEKFDSVHSKYMNRTSFDSDSWTLRLHNLQIKDKGLYQCIIHHKKPTGMIRIHQMNSELSVLANFSQPEIVPISNITENVYINLTCSSIHGYPEPKKMSVLLRTKNSTIEYDGIMQKSQDNVTELYDVSISLSVSFPDVTSNMTIFCILETDKTRLLSSPFSIELEDPQPPPDHIP

SEQ ID NO: 427 - protein, 110 aa, Artificial sequence
  synthetic sequence
  misc_feature (41)..(41): Xaa can be any amino acid other than valine
APLKIQAYFNETADLPCQFANSQNQSLSELVVFWQDQENLXLNEVYLGKEKFDSVHSKYMNRTSFDSDSWTLRLHNLQIKDKGLYQCIIHHKKPTGMIRIHQMNSELSVL

SEQ ID NO: 428 - protein, 224 aa, Artificial sequence
  synthetic sequence
  misc_feature (35)..(35): Xaa can be any amino acid other than glutamine
APLKIQAYFNETADLPCQFANSQNQSLSELVVFWXDQENLVLNEVYLGKEKFDSVHSKYMNRTSFDSDSWTLRLHNLQIKDKGLYQCIIHHKKPTGMIRIHQMNSELSVLANFSQPEIVPISNITENVYINLTCSSIHGYPEPKKMSVLLRTKNSTIEYDGIMQKSQDNVTELYDVSISLSVSFPDVTSNMTIFCILETDKTRLLSSPFSIELEDPQPPPDHIP

SEQ ID NO: 429 - protein, 110 aa, Artificial sequence
  synthetic sequence
  misc_feature (35)..(35): Xaa can be any amino acid other than glutamine
APLKIQAYFNETADLPCQFANSQNQSLSELVVFWXDQENLVLNEVYLGKEKFDSVHSKYMNRTSFDSDSWTLRLHNLQIKDKGLYQCIIHHKKPTGMIRIHQMNSELSVL

SEQ ID NO: 430 - protein, 224 aa, Artificial sequence
  synthetic sequence
  misc_feature (33)..(33): Xaa can be any amino acid other than phenylalanine
APLKIQAYFNETADLPCQFANSQNQSLSELVVXWQDQENLVLNEVYLGKEKFDSVHSKYMNRTSFDSDSWTLRLHNLQIKDKGLYQCIIHHKKPTGMIRIHQMNSELSVLANFSQPEIVPISNITENVYINLTCSSIHGYPEPKKMSVLLRTKNSTIEYDGIMQKSQDNVTELYDVSISLSVSFPDVTSNMTIFCILETDKTRLLSSPFSIELEDPQPPPDHIP

SEQ ID NO: 431 - protein, 110 aa, Artificial sequence
  synthetic sequence
  misc_feature (33)..(33): Xaa can be any amino acid other than phenylalanine
APLKIQAYFNETADLPCQFANSQNQSLSELVVXWQDQENLVLNEVYLGKEKFDSVHSKYMNRTSFDSDSWTLRLHNLQIKDKGLYQCIIHHKKPTGMIRIHQMNSELSVL

SEQ ID NO: 432 - protein, 224 aa, Artificial sequence
  synthetic sequence
  misc_feature (72)..(72): Xaa can be any amino acid other than leucine
APLKIQAYFNETADLPCQFANSQNQSLSELVVFWQDQENLVLNEVYLGKEKFDSVHSKYMNRTSFDSDSWTXRLHNLQIKDKGLYQCIIHHKKPTGMIRIHQMNSELSVLANFSQPEIVPISNITENVYINLTCSSIHGYPEPKKMSVLLRTKNSTIEYDGIMQKSQDNVTELYDVSISLSVSFPDVTSNMTIFCILETDKTRLLSSPFSIELEDPQPPPDHIP

SEQ ID NO: 433 - protein, 110 aa, Artificial sequence
  synthetic sequence
  misc_feature (72)..(72): Xaa can be any amino acid other than leucine
APLKIQAYFNETADLPCQFANSQNQSLSELVVFWQDQENLVLNEVYLGKEKFDSVHSKYMNRTSFDSDSWTXRLHNLQIKDKGLYQCIIHHKKPTGMIRIHQMNSELSVL

SEQ ID NO: 434 - protein, 224 aa, Artificial sequence
  synthetic sequence
  misc_feature (59)..(59): Xaa can be any amino acid other than tyrosine
APLKIQAYFNETADLPCQFANSQNQSLSELVVFWQDQENLVLNEVYLGKEKFDSVHSKXMNRTSFDSDSWTLRLHNLQIKDKGLYQCIIHHKKPTGMIRIHQMNSELSVLANFSQPEIVPISNITENVYINLTCSSIHGYPEPKKMSVLLRTKNSTIEYDGIMQKSQDNVTELYDVSISLSVSFPDVTSNMTIFCILETDKTRLLSSPFSIELEDPQPPPDHIP

SEQ ID NO: 435 - protein, 110 aa, Artificial sequence
  synthetic sequence
  misc_feature (59)..(59): Xaa can be any amino acid other than tyrosine
APLKIQAYFNETADLPCQFANSQNQSLSELVVFWQDQENLVLNEVYLGKEKFDSVHSKXMNRTSFDSDSWTLRLHNLQIKDKGLYQCIIHHKKPTGMIRIHQMNSELSVL

SEQ ID NO: 436 - protein, 224 aa, Artificial sequence
  synthetic sequence
  misc_feature (61)..(61): Xaa can be any amino acid other than asparagine
  misc_feature (91)..(91): Xaa can be any amino acid other than histidine
APLKIQAYFNETADLPCQFANSQNQSLSELVVFWQDQENLVLNEVYLGKEKFDSVHSKYMXRTSFDSDSWTLRLHNLQIKDKGLYQCIIHXKKPTGMIRIHQMNSELSVLANFSQPEIVPISNITENVYINLTCSSIHGYPEPKKMSVLLRTKNSTIEYDGIMQKSQDNVTELYDVSISLSVSFPDVTSNMTIFCILETDKTRLLSSPFSIELEDPQPPPDHIP

SEQ ID NO: 437 - protein, 110 aa, Artificial sequence
  synthetic sequence
  misc_feature (61)..(61): Xaa can be any amino acid other than asparagine
  misc_feature (91)..(91): Xaa can be any amino acid other than histidine
APLKIQAYFNETADLPCQFANSQNQSLSELVVFWQDQENLVLNEVYLGKEKFDSVHSKYMXRTSFDSDSWTLRLHNLQIKDKGLYQCIIHXKKPTGMIRIHQMNSELSVL

SEQ ID NO: 438 - protein, 224 aa, Artificial sequence
  synthetic sequence
  misc_feature (66)..(66): Xaa can be any amino acid other than aspartic acid
  misc_feature (91)..(91): Xaa can be any amino acid other than histidine
APLKIQAYFNETADLPCQFANSQNQSLSELVVFWQDQENLVLNEVYLGKEKFDSVHSKYMNRTSFXSDSWTLRLHNLQIKDKGLYQCIIHXKKPTGMIRIHQMNSELSVLANFSQPEIVPISNITENVYINLTCSSIHGYPEPKKMSVLLRTKNSTIEYDGIMQKSQDNVTELYDVSISLSVSFPDVTSNMTIFCILETDKTRLLSSPFSIELEDPQPPPDHIP

SEQ ID NO: 439 - protein, 110 aa, Artificial sequence
  synthetic sequence
  misc_feature (66)..(66): Xaa can be any amino acid other than asparagine
  misc_feature (91)..(91): Xaa can be any amino acid other than His
APLKIQAYFNETADLPCQFANSQNQSLSELVVFWQDQENLVLNEVYLGKEKFDSVHSKYMNRTSFXSDSWTLRLHNLQIKDKGLYQCIIHXKKPTGMIRIHQMNSELSVL

SEQ ID NO: 440 - protein, 224 aa, Artificial sequence
  synthetic sequence
  misc_feature (61)..(61): Xaa can be any amino acid other than asparagine
  misc_feature (66)..(66): Xaa can be any amino acid other than aspartic acid
  misc_feature (91)..(91): Xaa can be any amino acid other than histidine
APLKIQAYFNETADLPCQFANSQNQSLSELVVFWQDQENLVLNEVYLGKEKFDSVHSKYMXRTSFXSDSWTLRLHNLQIKDKGLYQCIIHXKKPTGMIRIHQMNSELSVLANFSQPEIVPISNITENVYINLTCSSIHGYPEPKKMSVLLRTKNSTIEYDGIMQKSQDNVTELYDVSISLSVSFPDVTSNMTIFCILETDKTRLLSSPFSIELEDPQPPPDHIP

SEQ ID NO: 441 - protein, 110 aa, Artificial sequence
  synthetic sequence
  misc_feature (61)..(61): Xaa can be any amino acid other than asparagine
  misc_feature (66)..(66): Xaa can be any amino acid other than aspartic acid
  misc_feature (91)..(91): Xaa can be any amino acid other than histidine
APLKIQAYFNETADLPCQFANSQNQSLSELVVFWQDQENLVLNEVYLGKEKFDSVHSKYMXRTSFXSDSWTLRLHNLQIKDKGLYQCIIHXKKPTGMIRIHQMNSELSVL

SEQ ID NO: 442 - protein, 174 aa, Artificial sequence
  synthetic sequence
  misc_feature (47)..(47): Xaa can be any amino acid other than lysine
PAGLLDLRQGMFAQLVAQNVLLIDGPLSWYSDPGLAGVSLTGGLSYXEDTKELVVAKAGVYYVFFQLELRRVVAGEGSGSVSLALHLQPLRSAAGAAALALTVDLPPASSEARNSAFGFQGRLLHLSAGQRLGVHLHTEARARHAWQLTQGATVLGLFRVTPEIPAGLPSPRSE

SEQ ID NO: 443 - protein, 174 aa, Artificial sequence
  synthetic sequence
  misc_feature (147)..(147): Xaa can be any amino acid other than glutamine
PAGLLDLRQGMFAQLVAQNVLLIDGPLSWYSDPGLAGVSLTGGLSYKEDTKELVVAKAGVYYVFFQLELRRVVAGEGSGSVSLALHLQPLRSAAGAAALALTVDLPPASSEARNSAFGFQGRLLHLSAGQRLGVHLHTEARARHAWXLTQGATVLGLFRVTPEIPAGLPSPRSE

SEQ ID NO: 444 - protein, 174 aa, Artificial sequence
  synthetic sequence
  misc_feature (11)..(11): Xaa can be any amino acid other than methionine
PAGLLDLRQGXFAQLVAQNVLLIDGPLSWYSDPGLAGVSLTGGLSYKEDTKELVVAKAGVYYVFFQLELRRVVAGEGSGSVSLALHLQPLRSAAGAAALALTVDLPPASSEARNSAFGFQGRLLHLSAGQRLGVHLHTEARARHAWQLTQGATVLGLFRVTPEIPAGLPSPRSE

SEQ ID NO: 445 - protein, 174 aa, Artificial sequence
  synthetic sequence
  misc_feature (12)..(12): Xaa can be any amino acid other than phenylalanine
PAGLLDLRQGMXAQLVAQNVLLIDGPLSWYSDPGLAGVSLTGGLSYKEDTKELVVAKAGVYYVFFQLELRRVVAGEGSGSVSLALHLQPLRSAAGAAALALTVDLPPASSEARNSAFGFQGRLLHLSAGQRLGVHLHTEARARHAWQLTQGATVLGLFRVTPEIPAGLPSPRSE

SEQ ID NO: 446 - protein, 174 aa, Artificial sequence
  synthetic sequence
  misc_feature (14)..(14): Xaa can be any amino acid other than glutamine
PAGLLDLRQGMFAXLVAQNVLLIDGPLSWYSDPGLAGVSLTGGLSYKEDTKELVVAKAGVYYVFFQLELRRVVAGEGSGSVSLALHLQPLRSAAGAAALALTVDLPPASSEARNSAFGFQGRLLHLSAGQRLGVHLHTEARARHAWQLTQGATVLGLFRVTPEIPAGLPSPRSE

SEQ ID NO: 447 - protein, 174 aa, Artificial sequence
  synthetic sequence
  misc_feature (15)..(15): Xaa can be any amino acid other than leucine
PAGLLDLRQGMFAQXVAQNVLLIDGPLSWYSDPGLAGVSLTGGLSYKEDTKELVVAKAGVYYVFFQLELRRVVAGEGSGSVSLALHLQPLRSAAGAAALALTVDLPPASSEARNSAFGFQGRLLHLSAGQRLGVHLHTEARARHAWQLTQGATVLGLFRVTPEIPAGLPSPRSE

SEQ ID NO: 448 - protein, 174 aa, Artificial sequence
  synthetic sequence
  misc_feature (16)..(16): Xaa can be any amino acid other than valine
PAGLLDLRQGMFAQLXAQNVLLIDGPLSWYSDPGLAGVSLTGGLSYKEDTKELVVAKAGVYYVFFQLELRRVVAGEGSGSVSLALHLQPLRSAAGAAALALTVDLPPASSEARNSAFGFQGRLLHLSAGQRLGVHLHTEARARHAWQLTQGATVLGLFRVTPEIPAGLPSPRSE

SEQ ID NO: 449 - protein, 174 aa, Artificial sequence
  synthetic sequence
  misc_feature (18)..(18): Xaa can be any amino acid other than glutamine
PAGLLDLRQGMFAQLVAXNVLLIDGPLSWYSDPGLAGVSLTGGLSYKEDTKELVVAKAGVYYVFFQLELRRVVAGEGSGSVSLALHLQPLRSAAGAAALALTVDLPPASSEARNSAFGFQGRLLHLSAGQRLGVHLHTEARARHAWQLTQGATVLGLFRVTPEIPAGLPSPRSE

SEQ ID NO: 450 - protein, 174 aa, Artificial sequence
  synthetic sequence
  misc_feature (19)..(19): Xaa can be any amino acid other than asparagine
PAGLLDLRQGMFAQLVAQXVLLIDGPLSWYSDPGLAGVSLTGGLSYKEDTKELVVAKAGVYYVFFQLELRRVVAGEGSGSVSLALHLQPLRSAAGAAALALTVDLPPASSEARNSAFGFQGRLLHLSAGQRLGVHLHTEARARHAWQLTQGATVLGLFRVTPEIPAGLPSPRSE

SEQ ID NO: 451 - protein, 174 aa, Artificial sequence
  synthetic sequence
  misc_feature (20)..(20): Xaa can be any amino acid other than valine
PAGLLDLRQGMFAQLVAQNXLLIDGPLSWYSDPGLAGVSLTGGLSYKEDTKELVVAKAGVYYVFFQLELRRVVAGEGSGSVSLALHLQPLRSAAGAAALALTVDLPPASSEARNSAFGFQGRLLHLSAGQRLGVHLHTEARARHAWQLTQGATVLGLFRVTPEIPAGLPSPRSE

SEQ ID NO: 452 - protein, 174 aa, Artificial sequence
  synthetic sequence
  misc_feature (21)..(21): Xaa can be any amino acid other than leucine
PAGLLDLRQGMFAQLVAQNVXLIDGPLSWYSDPGLAGVSLTGGLSYKEDTKELVVAKAGVYYVFFQLELRRVVAGEGSGSVSLALHLQPLRSAAGAAALALTVDLPPASSEARNSAFGFQGRLLHLSAGQRLGVHLHTEARARHAWQLTQGATVLGLFRVTPEIPAGLPSPRSE

SEQ ID NO: 453 - protein, 174 aa, Artificial sequence
  synthetic sequence
  misc_feature (22)..(22): Xaa can be any amino acid other than leucine
PAGLLDLRQGMFAQLVAQNVLXIDGPLSWYSDPGLAGVSLTGGLSYKEDTKELVVAKAGVYYVFFQLELRRVVAGEGSGSVSLALHLQPLRSAAGAAALALTVDLPPASSEARNSAFGFQGRLLHLSAGQRLGVHLHTEARARHAWQLTQGATVLGLFRVTPEIPAGLPSPRSE

SEQ ID NO: 454 - protein, 174 aa, Artificial sequence
  synthetic sequence
  misc_feature (23)..(23): Xaa can be any amino acid other than isoleucine
PAGLLDLRQGMFAQLVAQNVLLXDGPLSWYSDPGLAGVSLTGGLSYKEDTKELVVAKAGVYYVFFQLELRRVVAGEGSGSVSLALHLQPLRSAAGAAALALTVDLPPASSEARNSAFGFQGRLLHLSAGQRLGVHLHTEARARHAWQLTQGATVLGLFRVTPEIPAGLPSPRSE

SEQ ID NO: 455 - protein, 174 aa, Artificial sequence
  synthetic sequence
  misc_feature (24)..(24): Xaa can be any amino acid other than aspartic acid
PAGLLDLRQGMFAQLVAQNVLLIXGPLSWYSDPGLAGVSLTGGLSYKEDTKELVVAKAGVYYVFFQLELRRVVAGEGSGSVSLALHLQPLRSAAGAAALALTVDLPPASSEARNSAFGFQGRLLHLSAGQRLGVHLHTEARARHAWQLTQGATVLGLFRVTPEIPAGLPSPRSE

SEQ ID NO: 456 - protein, 174 aa, Artificial sequence
  synthetic sequence
  misc_feature (25)..(25): Xaa can be any amino acid other than glycine
PAGLLDLRQGMFAQLVAQNVLLIDXPLSWYSDPGLAGVSLTGGLSYKEDTKELVVAKAGVYYVFFQLELRRVVAGEGSGSVSLALHLQPLRSAAGAAALALTVDLPPASSEARNSAFGFQGRLLHLSAGQRLGVHLHTEARARHAWQLTQGATVLGLFRVTPEIPAGLPSPRSE

SEQ ID NO: 457 - protein, 174 aa, Artificial sequence
  synthetic sequence
  misc_feature (26)..(26): Xaa can be any amino acid other than proline
PAGLLDLRQGMFAQLVAQNVLLIDGXLSWYSDPGLAGVSLTGGLSYKEDTKELVVAKAGVYYVFFQLELRRVVAGEGSGSVSLALHLQPLRSAAGAAALALTVDLPPASSEARNSAFGFQGRLLHLSAGQRLGVHLHTEARARHAWQLTQGATVLGLFRVTPEIPAGLPSPRSE

SEQ ID NO: 458 - protein, 174 aa, Artificial sequence
  synthetic sequence
  misc_feature (27)..(27): Xaa can be any amino acid other than leucine
PAGLLDLRQGMFAQLVAQNVLLIDGPXSWYSDPGLAGVSLTGGLSYKEDTKELVVAKAGVYYVFFQLELRRVVAGEGSGSVSLALHLQPLRSAAGAAALALTVDLPPASSEARNSAFGFQGRLLHLSAGQRLGVHLHTEARARHAWQLTQGATVLGLFRVTPEIPAGLPSPRSE

SEQ ID NO: 459 - protein, 174 aa, Artificial sequence
  synthetic sequence
  misc_feature (28)..(28): Xaa can be any amino acid other than serine
PAGLLDLRQGMFAQLVAQNVLLIDGPLXWYSDPGLAGVSLTGGLSYKEDTKELVVAKAGVYYVFFQLELRRVVAGEGSGSVSLALHLQPLRSAAGAAALALTVDLPPASSEARNSAFGFQGRLLHLSAGQRLGVHLHTEARARHAWQLTQGATVLGLFRVTPEIPAGLPSPRSE

SEQ ID NO: 460 - protein, 174 aa, Artificial sequence
  synthetic sequence
  misc_feature (29)..(29): Xaa can be any amino acid other than tryptophan
PAGLLDLRQGMFAQLVAQNVLLIDGPLSXYSDPGLAGVSLTGGLSYKEDTKELVVAKAGVYYVFFQLELRRVVAGEGSGSVSLALHLQPLRSAAGAAALALTVDLPPASSEARNSAFGFQGRLLHLSAGQRLGVHLHTEARARHAWQLTQGATVLGLFRVTPEIPAGLPSPRSE

SEQ ID NO: 461 - protein, 174 aa, Artificial sequence
  synthetic sequence
  misc_feature (30)..(30): Xaa can be any amino acid other than tyrosine
PAGLLDLRQGMFAQLVAQNVLLIDGPLSWXSDPGLAGVSLTGGLSYKEDTKELVVAKAGVYYVFFQLELRRVVAGEGSGSVSLALHLQPLRSAAGAAALALTVDLPPASSEARNSAFGFQGRLLHLSAGQRLGVHLHTEARARHAWQLTQGATVLGLFRVTPEIPAGLPSPRSE

SEQ ID NO: 462 - protein, 174 aa, Artificial sequence
  synthetic sequence
  misc_feature (31)..(31): Xaa can be any amino acid other than serine
PAGLLDLRQGMFAQLVAQNVLLIDGPLSWYXDPGLAGVSLTGGLSYKEDTKELVVAKAGVYYVFFQLELRRVVAGEGSGSVSLALHLQPLRSAAGAAALALTVDLPPASSEARNSAFGFQGRLLHLSAGQRLGVHLHTEARARHAWQLTQGATVLGLFRVTPEIPAGLPSPRSE

SEQ ID NO: 463 - protein, 174 aa, Artificial sequence
  synthetic sequence
  misc_feature (32)..(32): Xaa can be any amino acid other than aspartic acid
PAGLLDLRQGMFAQLVAQNVLLIDGPLSWYSXPGLAGVSLTGGLSYKEDTKELVVAKAGVYYVFFQLELRRVVAGEGSGSVSLALHLQPLRSAAGAAALALTVDLPPASSEARNSAFGFQGRLLHLSAGQRLGVHLHTEARARHAWQLTQGATVLGLFRVTPEIPAGLPSPRSE

SEQ ID NO: 464 - protein, 174 aa, Artificial sequence
  synthetic sequence
  misc_feature (33)..(33): Xaa can be any amino acid other than proline
PAGLLDLRQGMFAQLVAQNVLLIDGPLSWYSDXGLAGVSLTGGLSYKEDTKELVVAKAGVYYVFFQLELRRVVAGEGSGSVSLALHLQPLRSAAGAAALALTVDLPPASSEARNSAFGFQGRLLHLSAGQRLGVHLHTEARARHAWQLTQGATVLGLFRVTPEIPAGLPSPRSE

SEQ ID NO: 465 - protein, 174 aa, Artificial sequence
  synthetic sequence
  misc_feature (34)..(34): Xaa can be any amino acid other than glycine
PAGLLDLRQGMFAQLVAQNVLLIDGPLSWYSDPXLAGVSLTGGLSYKEDTKELVVAKAGVYYVFFQLELRRVVAGEGSGSVSLALHLQPLRSAAGAAALALTVDLPPASSEARNSAFGFQGRLLHLSAGQRLGVHLHTEARARHAWQLTQGATVLGLFRVTPEIPAGLPSPRSE

SEQ ID NO: 466 - protein, 174 aa, Artificial sequence
  synthetic sequence
  misc_feature (35)..(35): Xaa can be any amino acid other than leucine
PAGLLDLRQGMFAQLVAQNVLLIDGPLSWYSDPGXAGVSLTGGLSYKEDTKELVVAKAGVYYVFFQLELRRVVAGEGSGSVSLALHLQPLRSAAGAAALALTVDLPPASSEARNSAFGFQGRLLHLSAGQRLGVHLHTEARARHAWQLTQGATVLGLFRVTPEIPAGLPSPRSE

SEQ ID NO: 467 - protein, 174 aa, Artificial sequence
  synthetic sequence
  misc_feature (37)..(37): Xaa can be any amino acid other than glycine
PAGLLDLRQGMFAQLVAQNVLLIDGPLSWYSDPGLAXVSLTGGLSYKEDTKELVVAKAGVYYVFFQLELRRVVAGEGSGSVSLALHLQPLRSAAGAAALALTVDLPPASSEARNSAFGFQGRLLHLSAGQRLGVHLHTEARARHAWQLTQGATVLGLFRVTPEIPAGLPSPRSE

SEQ ID NO: 468 - protein, 174 aa, Artificial sequence
  synthetic sequence
  misc_feature (38)..(38): Xaa can be any amino acid other than valine
PAGLLDLRQGMFAQLVAQNVLLIDGPLSWYSDPGLAGXSLTGGLSYKEDTKELVVAKAGVYYVFFQLELRRVVAGEGSGSVSLALHLQPLRSAAGAAALALTVDLPPASSEARNSAFGFQGRLLHLSAGQRLGVHLHTEARARHAWQLTQGATVLGLFRVTPEIPAGLPSPRSE

SEQ ID NO: 469 - protein, 174 aa, Artificial sequence
  synthetic sequence
  misc_feature (39)..(39): Xaa can be any amino acid other than serine
PAGLLDLRQGMFAQLVAQNVLLIDGPLSWYSDPGLAGVXLTGGLSYKEDTKELVVAKAGVYYVFFQLELRRVVAGEGSGSVSLALHLQPLRSAAGAAALALTVDLPPASSEARNSAFGFQGRLLHLSAGQRLGVHLHTEARARHAWQLTQGATVLGLFRVTPEIPAGLPSPRSE

SEQ ID NO: 470 - protein, 174 aa, Artificial sequence
  synthetic sequence
  misc_feature (40)..(40): Xaa can be any amino acid other than leucine
PAGLLDLRQGMFAQLVAQNVLLIDGPLSWYSDPGLAGVSXTGGLSYKEDTKELVVAKAGVYYVFFQLELRRVVAGEGSGSVSLALHLQPLRSAAGAAALALTVDLPPASSEARNSAFGFQGRLLHLSAGQRLGVHLHTEARARHAWQLTQGATVLGLFRVTPEIPAGLPSPRSE

SEQ ID NO: 471 - protein, 174 aa, Artificial sequence
  synthetic sequence
  misc_feature (41)..(41): Xaa can be any amino acid other than threonine
PAGLLDLRQGMFAQLVAQNVLLIDGPLSWYSDPGLAGVSLXGGLSYKEDTKELVVAKAGVYYVFFQLELRRVVAGEGSGSVSLALHLQPLRSAAGAAALALTVDLPPASSEARNSAFGFQGRLLHLSAGQRLGVHLHTEARARHAWQLTQGATVLGLFRVTPEIPAGLPSPRSE

SEQ ID NO: 472 - protein, 174 aa, Artificial sequence
  synthetic sequence
  misc_feature (42)..(42): Xaa can be any amino acid other than glycine
PAGLLDLRQGMFAQLVAQNVLLIDGPLSWYSDPGLAGVSLTXGLSYKEDTKELVVAKAGVYYVFFQLELRRVVAGEGSGSVSLALHLQPLRSAAGAAALALTVDLPPASSEARNSAFGFQGRLLHLSAGQRLGVHLHTEARARHAWQLTQGATVLGLFRVTPEIPAGLPSPRSE

SEQ ID NO: 473 - protein, 174 aa, Artificial sequence
  synthetic sequence
  misc_feature (43)..(43): Xaa can be any amino acid other than glycine
PAGLLDLRQGMFAQLVAQNVLLIDGPLSWYSDPGLAGVSLTGXLSYKEDTKELVVAKAGVYYVFFQLELRRVVAGEGSGSVSLALHLQPLRSAAGAAALALTVDLPPASSEARNSAFGFQGRLLHLSAGQRLGVHLHTEARARHAWQLTQGATVLGLFRVTPEIPAGLPSPRSE

SEQ ID NO: 474 - protein, 174 aa, Artificial sequence
  synthetic sequence
  misc_feature (44)..(44): Xaa can be any amino acid other than leucine
PAGLLDLRQGMFAQLVAQNVLLIDGPLSWYSDPGLAGVSLTGGXSYKEDTKELVVAKAGVYYVFFQLELRRVVAGEGSGSVSLALHLQPLRSAAGAAALALTVDLPPASSEARNSAFGFQGRLLHLSAGQRLGVHLHTEARARHAWQLTQGATVLGLFRVTPEIPAGLPSPRSE

SEQ ID NO: 475 - protein, 174 aa, Artificial sequence
  synthetic sequence
  misc_feature (45)..(45): Xaa can be any amino acid other than serine
PAGLLDLRQGMFAQLVAQNVLLIDGPLSWYSDPGLAGVSLTGGLXYKEDTKELVVAKAGVYYVFFQLELRRVVAGEGSGSVSLALHLQPLRSAAGAAALALTVDLPPASSEARNSAFGFQGRLLHLSAGQRLGVHLHTEARARHAWQLTQGATVLGLFRVTPEIPAGLPSPRSE

SEQ ID NO: 476 - protein, 174 aa, Artificial sequence
  synthetic sequence
  misc_feature (46)..(46): Xaa can be any amino acid other than tyrosine
PAGLLDLRQGMFAQLVAQNVLLIDGPLSWYSDPGLAGVSLTGGLSXKEDTKELVVAKAGVYYVFFQLELRRVVAGEGSGSVSLALHLQPLRSAAGAAALALTVDLPPASSEARNSAFGFQGRLLHLSAGQRLGVHLHTEARARHAWQLTQGATVLGLFRVTPEIPAGLPSPRSE

SEQ ID NO: 477 - protein, 174 aa, Artificial sequence
  synthetic sequence
  misc_feature (48)..(48): Xaa can be any amino acid other than glutamic acid
PAGLLDLRQGMFAQLVAQNVLLIDGPLSWYSDPGLAGVSLTGGLSYKXDTKELVVAKAGVYYVFFQLELRRVVAGEGSGSVSLALHLQPLRSAAGAAALALTVDLPPASSEARNSAFGFQGRLLHLSAGQRLGVHLHTEARARHAWQLTQGATVLGLFRVTPEIPAGLPSPRSE

SEQ ID NO: 478 - protein, 174 aa, Artificial sequence
  synthetic sequence
  misc_feature (49)..(49): Xaa can be any amino acid other than aspartic acid
PAGLLDLRQGMFAQLVAQNVLLIDGPLSWYSDPGLAGVSLTGGLSYKEXTKELVVAKAGVYYVFFQLELRRVVAGEGSGSVSLALHLQPLRSAAGAAALALTVDLPPASSEARNSAFGFQGRLLHLSAGQRLGVHLHTEARARHAWQLTQGATVLGLFRVTPEIPAGLPSPRSE

SEQ ID NO: 479 - protein, 174 aa, Artificial sequence
  synthetic sequence
  misc_feature (50)..(50): Xaa can be any amino acid other than threonine
PAGLLDLRQGMFAQLVAQNVLLIDGPLSWYSDPGLAGVSLTGGLSYKEDXKELVVAKAGVYYVFFQLELRRVVAGEGSGSVSLALHLQPLRSAAGAAALALTVDLPPASSEARNSAFGFQGRLLHLSAGQRLGVHLHTEARARHAWQLTQGATVLGLFRVTPEIPAGLPSPRSE

SEQ ID NO: 480 - protein, 174 aa, Artificial sequence
  synthetic sequence
  misc_feature (51)..(51): Xaa can be any amino acid other than lysine
PAGLLDLRQGMFAQLVAQNVLLIDGPLSWYSDPGLAGVSLTGGLSYKEDTXELVVAKAGVYYVFFQLELRRVVAGEGSGSVSLALHLQPLRSAAGAAALALTVDLPPASSEARNSAFGFQGRLLHLSAGQRLGVHLHTEARARHAWQLTQGATVLGLFRVTPEIPAGLPSPRSE

SEQ ID NO: 481 - protein, 174 aa, Artificial sequence
  synthetic sequence
  misc_feature (52)..(52): Xaa can be any amino acid other than glutamic acid
PAGLLDLRQGMFAQLVAQNVLLIDGPLSWYSDPGLAGVSLTGGLSYKEDTKXLVVAKAGVYYVFFQLELRRVVAGEGSGSVSLALHLQPLRSAAGAAALALTVDLPPASSEARNSAFGFQGRLLHLSAGQRLGVHLHTEARARHAWQLTQGATVLGLFRVTPEIPAGLPSPRSE

SEQ ID NO: 482 - protein, 174 aa, Artificial sequence
  synthetic sequence
  misc_feature (64)..(64): Xaa can be any amino acid other than phenylalanine
PAGLLDLRQGMFAQLVAQNVLLIDGPLSWYSDPGLAGVSLTGGLSYKEDTKELVVAKAGVYYVXFQLELRRVVAGEGSGSVSLALHLQPLRSAAGAAALALTVDLPPASSEARNSAFGFQGRLLHLSAGQRLGVHLHTEARARHAWQLTQGATVLGLFRVTPEIPAGLPSPRSE

SEQ ID NO: 483 - protein, 174 aa, Artificial sequence
  synthetic sequence
  misc_feature (65)..(65): Xaa can be any amino acid other than phenylalanine
PAGLLDLRQGMFAQLVAQNVLLIDGPLSWYSDPGLAGVSLTGGLSYKEDTKELVVAKAGVYYVFXQLELRRVVAGEGSGSVSLALHLQPLRSAAGAAALALTVDLPPASSEARNSAFGFQGRLLHLSAGQRLGVHLHTEARARHAWQLTQGATVLGLFRVTPEIPAGLPSPRSE

SEQ ID NO: 484 - protein, 174 aa, Artificial sequence
  synthetic sequence
  misc_feature (66)..(66): Xaa can be any amino acid other than glutamine
PAGLLDLRQGMFAQLVAQNVLLIDGPLSWYSDPGLAGVSLTGGLSYKEDTKELVVAKAGVYYVFFXLELRRVVAGEGSGSVSLALHLQPLRSAAGAAALALTVDLPPASSEARNSAFGFQGRLLHLSAGQRLGVHLHTEARARHAWQLTQGATVLGLFRVTPEIPAGLPSPRSE

SEQ ID NO: 485 - protein, 174 aa, Artificial sequence
  synthetic sequence
  misc_feature (67)..(67): Xaa can be any amino acid other than leucine
PAGLLDLRQGMFAQLVAQNVLLIDGPLSWYSDPGLAGVSLTGGLSYKEDTKELVVAKAGVYYVFFQXELRRVVAGEGSGSVSLALHLQPLRSAAGAAALALTVDLPPASSEARNSAFGFQGRLLHLSAGQRLGVHLHTEARARHAWQLTQGATVLGLFRVTPEIPAGLPSPRSE

SEQ ID NO: 486 - protein, 174 aa, Artificial sequence
  synthetic sequence
  misc_feature (68)..(68): Xaa can be any amino acid other than glutamic acid
PAGLLDLRQGMFAQLVAQNVLLIDGPLSWYSDPGLAGVSLTGGLSYKEDTKELVVAKAGVYYVFFQLXLRRVVAGEGSGSVSLALHLQPLRSAAGAAALALTVDLPPASSEARNSAFGFQGRLLHLSAGQRLGVHLHTEARARHAWQLTQGATVLGLFRVTPEIPAGLPSPRSE

SEQ ID NO: 487 - protein, 174 aa, Artificial sequence
  synthetic sequence
  misc_feature (69)..(69): Xaa can be any amino acid other than leucine
PAGLLDLRQGMFAQLVAQNVLLIDGPLSWYSDPGLAGVSLTGGLSYKEDTKELVVAKAGVYYVFFQLEXRRVVAGEGSGSVSLALHLQPLRSAAGAAALALTVDLPPASSEARNSAFGFQGRLLHLSAGQRLGVHLHTEARARHAWQLTQGATVLGLFRVTPEIPAGLPSPRSE

SEQ ID NO: 488 - protein, 174 aa, Artificial sequence
  synthetic sequence
  misc_feature (70)..(70): Xaa can be any amino acid other than arginine
PAGLLDLRQGMFAQLVAQNVLLIDGPLSWYSDPGLAGVSLTGGLSYKEDTKELVVAKAGVYYVFFQLELXRVVAGEGSGSVSLALHLQPLRSAAGAAALALTVDLPPASSEARNSAFGFQGRLLHLSAGQRLGVHLHTEARARHAWQLTQGATVLGLFRVTPEIPAGLPSPRSE

SEQ ID NO: 489 - protein, 174 aa, Artificial sequence
  synthetic sequence
  misc_feature (71)..(71): Xaa can be any amino acid other than arginine
PAGLLDLRQGMFAQLVAQNVLLIDGPLSWYSDPGLAGVSLTGGLSYKEDTKELVVAKAGVYYVFFQLELRXVVAGEGSGSVSLALHLQPLRSAAGAAALALTVDLPPASSEARNSAFGFQGRLLHLSAGQRLGVHLHTEARARHAWQLTQGATVLGLFRVTPEIPAGLPSPRSE

SEQ ID NO: 490 - protein, 174 aa, Artificial sequence
  synthetic sequence
  misc_feature (72)..(72): Xaa can be any amino acid other than valine
PAGLLDLRQGMFAQLVAQNVLLIDGPLSWYSDPGLAGVSLTGGLSYKEDTKELVVAKAGVYYVFFQLELRRXVAGEGSGSVSLALHLQPLRSAAGAAALALTVDLPPASSEARNSAFGFQGRLLHLSAGQRLGVHLHTEARARHAWQLTQGATVLGLFRVTPEIPAGLPSPRSE

SEQ ID NO: 491 - protein, 174 aa, Artificial sequence
  synthetic sequence
  misc_feature (73)..(73): Xaa can be any amino acid other than valine
PAGLLDLRQGMFAQLVAQNVLLIDGPLSWYSDPGLAGVSLTGGLSYKEDTKELVVAKAGVYYVFFQLELRRVXAGEGSGSVSLALHLQPLRSAAGAAALALTVDLPPASSEARNSAFGFQGRLLHLSAGQRLGVHLHTEARARHAWQLTQGATVLGLFRVTPEIPAGLPSPRSE

SEQ ID NO: 492 - protein, 174 aa, Artificial sequence
  synthetic sequence
  misc_feature (75)..(75): Xaa can be any amino acid other than glycine
PAGLLDLRQGMFAQLVAQNVLLIDGPLSWYSDPGLAGVSLTGGLSYKEDTKELVVAKAGVYYVFFQLELRRVVAXEGSGSVSLALHLQPLRSAAGAAALALTVDLPPASSEARNSAFGFQGRLLHLSAGQRLGVHLHTEARARHAWQLTQGATVLGLFRVTPEIPAGLPSPRSE

SEQ ID NO: 493 - protein, 174 aa, Artificial sequence
  synthetic sequence
  misc_feature (76)..(76): Xaa can be any amino acid other than glutamic acid
PAGLLDLRQGMFAQLVAQNVLLIDGPLSWYSDPGLAGVSLTGGLSYKEDTKELVVAKAGVYYVFFQLELRRVVAGXGSGSVSLALHLQPLRSAAGAAALALTVDLPPASSEARNSAFGFQGRLLHLSAGQRLGVHLHTEARARHAWQLTQGATVLGLFRVTPEIPAGLPSPRSE

SEQ ID NO: 494 - protein, 174 aa, Artificial sequence
  synthetic sequence
  misc_feature (77)..(77): Xaa can be any amino acid other than glycine
PAGLLDLRQGMFAQLVAQNVLLIDGPLSWYSDPGLAGVSLTGGLSYKEDTKELVVAKAGVYYVFFQLELRRVVAGEXSGSVSLALHLQPLRSAAGAAALALTVDLPPASSEARNSAFGFQGRLLHLSAGQRLGVHLHTEARARHAWQLTQGATVLGLFRVTPEIPAGLPSPRSE

SEQ ID NO: 495 - protein, 174 aa, Artificial sequence
  synthetic sequence
  misc_feature (78)..(78): Xaa can be any amino acid other than serine
PAGLLDLRQGMFAQLVAQNVLLIDGPLSWYSDPGLAGVSLTGGLSYKEDTKELVVAKAGVYYVFFQLELRRVVAGEGXGSVSLALHLQPLRSAAGAAALALTVDLPPASSEARNSAFGFQGRLLHLSAGQRLGVHLHTEARARHAWQLTQGATVLGLFRVTPEIPAGLPSPRSE

SEQ ID NO: 496 - protein, 174 aa, Artificial sequence
  synthetic sequence
  misc_feature (104)..(104): Xaa can be any amino acid other than aspartic acid
PAGLLDLRQGMFAQLVAQNVLLIDGPLSWYSDPGLAGVSLTGGLSYKEDTKELVVAKAGVYYVFFQLELRRVVAGEGSGSVSLALHLQPLRSAAGAAALALTVXLPPASSEARNSAFGFQGRLLHLSAGQRLGVHLHTEARARHAWQLTQGATVLGLFRVTPEIPAGLPSPRSE

SEQ ID NO: 497 - protein, 174 aa, Artificial sequence
  synthetic sequence
  misc_feature (105)..(105): Xaa can be any amino acid other than leucine
PAGLLDLRQGMFAQLVAQNVLLIDGPLSWYSDPGLAGVSLTGGLSYKEDTKELVVAKAGVYYVFFQLELRRVVAGEGSGSVSLALHLQPLRSAAGAAALALTVDXPPASSEARNSAFGFQGRLLHLSAGQRLGVHLHTEARARHAWQLTQGATVLGLFRVTPEIPAGLPSPRSE

SEQ ID NO: 498 - protein, 174 aa, Artificial sequence
  synthetic sequence
  misc_feature (106)..(106): Xaa can be any amino acid other than proline
PAGLLDLRQGMFAQLVAQNVLLIDGPLSWYSDPGLAGVSLTGGLSYKEDTKELVVAKAGVYYVFFQLELRRVVAGEGSGSVSLALHLQPLRSAAGAAALALTVDLXPASSEARNSAFGFQGRLLHLSAGQRLGVHLHTEARARHAWQLTQGATVLGLFRVTPEIPAGLPSPRSE

SEQ ID NO: 499 - protein, 174 aa, Artificial sequence
  synthetic sequence
  misc_feature (109)..(109): Xaa can be any amino acid other than serine
PAGLLDLRQGMFAQLVAQNVLLIDGPLSWYSDPGLAGVSLTGGLSYKEDTKELVVAKAGVYYVFFQLELRRVVAGEGSGSVSLALHLQPLRSAAGAAALALTVDLPPAXSEARNSAFGFQGRLLHLSAGQRLGVHLHTEARARHAWQLTQGATVLGLFRVTPEIPAGLPSPRSE

SEQ ID NO: 500 - protein, 174 aa, Artificial sequence
  synthetic sequence
  misc_feature (110)..(110): Xaa can be any amino acid other than serine
PAGLLDLRQGMFAQLVAQNVLLIDGPLSWYSDPGLAGVSLTGGLSYKEDTKELVVAKAGVYYVFFQLELRRVVAGEGSGSVSLALHLQPLRSAAGAAALALTVDLPPASXEARNSAFGFQGRLLHLSAGQRLGVHLHTEARARHAWQLTQGATVLGLFRVTPEIPAGLPSPRSE

SEQ ID NO: 501 - protein, 174 aa, Artificial sequence
  synthetic sequence
  misc_feature (111)..(111): Xaa can be any amino acid other than glutamic acid
PAGLLDLRQGMFAQLVAQNVLLIDGPLSWYSDPGLAGVSLTGGLSYKEDTKELVVAKAGVYYVFFQLELRRVVAGEGSGSVSLALHLQPLRSAAGAAALALTVDLPPASSXARNSAFGFQGRLLHLSAGQRLGVHLHTEARARHAWQLTQGATVLGLFRVTPEIPAGLPSPRSE

SEQ ID NO: 502 - protein, 174 aa, Artificial sequence
  synthetic sequence
  misc_feature (113)..(113): Xaa can be any amino acid other than arginine
PAGLLDLRQGMFAQLVAQNVLLIDGPLSWYSDPGLAGVSLTGGLSYKEDTKELVVAKAGVYYVFFQLELRRVVAGEGSGSVSLALHLQPLRSAAGAAALALTVDLPPASSEAXNSAFGFQGRLLHLSAGQRLGVHLHTEARARHAWQLTQGATVLGLFRVTPEIPAGLPSPRSE

SEQ ID NO: 503 - protein, 174 aa, Artificial sequence
  synthetic sequence
  misc_feature (114)..(114): Xaa can be any amino acid other than asparagine
PAGLLDLRQGMFAQLVAQNVLLIDGPLSWYSDPGLAGVSLTGGLSYKEDTKELVVAKAGVYYVFFQLELRRVVAGEGSGSVSLALHLQPLRSAAGAAALALTVDLPPASSEARXSAFGFQGRLLHLSAGQRLGVHLHTEARARHAWQLTQGATVLGLFRVTPEIPAGLPSPRSE

SEQ ID NO: 504 - protein, 174 aa, Artificial sequence
  synthetic sequence
  misc_feature (115)..(115): Xaa can be any amino acid other than serine
PAGLLDLRQGMFAQLVAQNVLLIDGPLSWYSDPGLAGVSLTGGLSYKEDTKELVVAKAGVYYVFFQLELRRVVAGEGSGSVSLALHLQPLRSAAGAAALALTVDLPPASSEARNXAFGFQGRLLHLSAGQRLGVHLHTEARARHAWQLTQGATVLGLFRVTPEIPAGLPSPRSE

SEQ ID NO: 505 - protein, 174 aa, Artificial sequence
  synthetic sequence
  misc_feature (117)..(117): Xaa can be any amino acid other than phenylalanine
PAGLLDLRQGMFAQLVAQNVLLIDGPLSWYSDPGLAGVSLTGGLSYKEDTKELVVAKAGVYYVFFQLELRRVVAGEGSGSVSLALHLQPLRSAAGAAALALTVDLPPASSEARNSAXGFQGRLLHLSAGQRLGVHLHTEARARHAWQLTQGATVLGLFRVTPEIPAGLPSPRSE

SEQ ID NO: 506 - protein, 174 aa, Artificial sequence
  synthetic sequence
  misc_feature (130)..(130): Xaa can be any amino acid other than glutamine
PAGLLDLRQGMFAQLVAQNVLLIDGPLSWYSDPGLAGVSLTGGLSYKEDTKELVVAKAGVYYVFFQLELRRVVAGEGSGSVSLALHLQPLRSAAGAAALALTVDLPPASSEARNSAFGFQGRLLHLSAGXRLGVHLHTEARARHAWQLTQGATVLGLFRVTPEIPAGLPSPRSE

SEQ ID NO: 507 - protein, 174 aa, Artificial sequence
  synthetic sequence
  misc_feature (131)..(131): Xaa can be any amino acid other than arginine
PAGLLDLRQGMFAQLVAQNVLLIDGPLSWYSDPGLAGVSLTGGLSYKEDTKELVVAKAGVYYVFFQLELRRVVAGEGSGSVSLALHLQPLRSAAGAAALALTVDLPPASSEARNSAFGFQGRLLHLSAGQXLGVHLHTEARARHAWQLTQGATVLGLFRVTPEIPAGLPSPRSE

SEQ ID NO: 508 - protein, 174 aa, Artificial sequence
  synthetic sequence
  misc_feature (132)..(132): Xaa can be any amino acid other than leucine
PAGLLDLRQGMFAQLVAQNVLLIDGPLSWYSDPGLAGVSLTGGLSYKEDTKELVVAKAGVYYVFFQLELRRVVAGEGSGSVSLALHLQPLRSAAGAAALALTVDLPPASSEARNSAFGFQGRLLHLSAGQRXGVHLHTEARARHAWQLTQGATVLGLFRVTPEIPAGLPSPRSE

SEQ ID NO: 509 - protein, 174 aa, Artificial sequence
  synthetic sequence
  misc_feature (133)..(133): Xaa can be any amino acid other than glycine
PAGLLDLRQGMFAQLVAQNVLLIDGPLSWYSDPGLAGVSLTGGLSYKEDTKELVVAKAGVYYVFFQLELRRVVAGEGSGSVSLALHLQPLRSAAGAAALALTVDLPPASSEARNSAFGFQGRLLHLSAGQRLXVHLHTEARARHAWQLTQGATVLGLFRVTPEIPAGLPSPRSE

SEQ ID NO: 510 - protein, 174 aa, Artificial sequence
  synthetic sequence
  misc_feature (134)..(134): Xaa can be any amino acid other than valine
PAGLLDLRQGMFAQLVAQNVLLIDGPLSWYSDPGLAGVSLTGGLSYKEDTKELVVAKAGVYYVFFQLELRRVVAGEGSGSVSLALHLQPLRSAAGAAALALTVDLPPASSEARNSAFGFQGRLLHLSAGQRLGXHLHTEARARHAWQLTQGATVLGLFRVTPEIPAGLPSPRSE

SEQ ID NO: 511 - protein, 174 aa, Artificial sequence
  synthetic sequence
  misc_feature (135)..(135): Xaa can be any amino acid other than histidine
PAGLLDLRQGMFAQLVAQNVLLIDGPLSWYSDPGLAGVSLTGGLSYKEDTKELVVAKAGVYYVFFQLELRRVVAGEGSGSVSLALHLQPLRSAAGAAALALTVDLPPASSEARNSAFGFQGRLLHLSAGQRLGVXLHTEARARHAWQLTQGATVLGLFRVTPEIPAGLPSPRSE

SEQ ID NO: 512 - protein, 174 aa, Artificial sequence
  synthetic sequence
  misc_feature (136)..(136): Xaa can be any amino acid other than leucine
PAGLLDLRQGMFAQLVAQNVLLIDGPLSWYSDPGLAGVSLTGGLSYKEDTKELVVAKAGVYYVFFQLELRRVVAGEGSGSVSLALHLQPLRSAAGAAALALTVDLPPASSEARNSAFGFQGRLLHLSAGQRLGVHXHTEARARHAWQLTQGATVLGLFRVTPEIPAGLPSPRSE

SEQ ID NO: 513 - protein, 174 aa, Artificial sequence
  synthetic sequence
  misc_feature (137)..(137): Xaa can be any amino acid other than histidine
PAGLLDLRQGMFAQLVAQNVLLIDGPLSWYSDPGLAGVSLTGGLSYKEDTKELVVAKAGVYYVFFQLELRRVVAGEGSGSVSLALHLQPLRSAAGAAALALTVDLPPASSEARNSAFGFQGRLLHLSAGQRLGVHLXTEARARHAWQLTQGATVLGLFRVTPEIPAGLPSPRSE

SEQ ID NO: 514 - protein, 174 aa, Artificial sequence
  synthetic sequence
  misc_feature (138)..(138): Xaa can be any amino acid other than threonine
PAGLLDLRQGMFAQLVAQNVLLIDGPLSWYSDPGLAGVSLTGGLSYKEDTKELVVAKAGVYYVFFQLELRRVVAGEGSGSVSLALHLQPLRSAAGAAALALTVDLPPASSEARNSAFGFQGRLLHLSAGQRLGVHLHXEARARHAWQLTQGATVLGLFRVTPEIPAGLPSPRSE

SEQ ID NO: 515 - protein, 174 aa, Artificial sequence
  synthetic sequence
  misc_feature (139)..(139): Xaa can be any amino acid other than glutamic acid
PAGLLDLRQGMFAQLVAQNVLLIDGPLSWYSDPGLAGVSLTGGLSYKEDTKELVVAKAGVYYVFFQLELRRVVAGEGSGSVSLALHLQPLRSAAGAAALALTVDLPPASSEARNSAFGFQGRLLHLSAGQRLGVHLHTXARARHAWQLTQGATVLGLFRVTPEIPAGLPSPRSE

SEQ ID NO: 516 - protein, 174 aa, Artificial sequence
  synthetic sequence
  misc_feature (141)..(141): Xaa can be any amino acid other than arginine
PAGLLDLRQGMFAQLVAQNVLLIDGPLSWYSDPGLAGVSLTGGLSYKEDTKELVVAKAGVYYVFFQLELRRVVAGEGSGSVSLALHLQPLRSAAGAAALALTVDLPPASSEARNSAFGFQGRLLHLSAGQRLGVHLHTEAXARHAWQLTQGATVLGLFRVTPEIPAGLPSPRSE

SEQ ID NO: 517 - protein, 174 aa, Artificial sequence
  synthetic sequence
  misc_feature (143)..(143): Xaa can be any amino acid other than arginine
PAGLLDLRQGMFAQLVAQNVLLIDGPLSWYSDPGLAGVSLTGGLSYKEDTKELVVAKAGVYYVFFQLELRRVVAGEGSGSVSLALHLQPLRSAAGAAALALTVDLPPASSEARNSAFGFQGRLLHLSAGQRLGVHLHTEARAXHAWQLTQGATVLGLFRVTPEIPAGLPSPRSE

SEQ ID NO: 518 - protein, 174 aa, Artificial sequence
  synthetic sequence
  misc_feature (144)..(144): Xaa can be any amino acid other than histidine
PAGLLDLRQGMFAQLVAQNVLLIDGPLSWYSDPGLAGVSLTGGLSYKEDTKELVVAKAGVYYVFFQLELRRVVAGEGSGSVSLALHLQPLRSAAGAAALALTVDLPPASSEARNSAFGFQGRLLHLSAGQRLGVHLHTEARARXAWQLTQGATVLGLFRVTPEIPAGLPSPRSE

SEQ ID NO: 519 - protein, 174 aa, Artificial sequence
  synthetic sequence
  misc_feature (146)..(146): Xaa can be any amino acid other than tryptophan
PAGLLDLRQGMFAQLVAQNVLLIDGPLSWYSDPGLAGVSLTGGLSYKEDTKELVVAKAGVYYVFFQLELRRVVAGEGSGSVSLALHLQPLRSAAGAAALALTVDLPPASSEARNSAFGFQGRLLHLSAGQRLGVHLHTEARARHAXQLTQGATVLGLFRVTPEIPAGLPSPRSE

SEQ ID NO: 520 - protein, 174 aa, Artificial sequence
  synthetic sequence
  misc_feature (148)..(148): Xaa can be any amino acid other than leucine
PAGLLDLRQGMFAQLVAQNVLLIDGPLSWYSDPGLAGVSLTGGLSYKEDTKELVVAKAGVYYVFFQLELRRVVAGEGSGSVSLALHLQPLRSAAGAAALALTVDLPPASSEARNSAFGFQGRLLHLSAGQRLGVHLHTEARARHAWQXTQGATVLGLFRVTPEIPAGLPSPRSE

SEQ ID NO: 521 - protein, 174 aa, Artificial sequence
  synthetic sequence
  misc_feature (149)..(149): Xaa can be any amino acid other than threonine
PAGLLDLRQGMFAQLVAQNVLLIDGPLSWYSDPGLAGVSLTGGLSYKEDTKELVVAKAGVYYVFFQLELRRVVAGEGSGSVSLALHLQPLRSAAGAAALALTVDLPPASSEARNSAFGFQGRLLHLSAGQRLGVHLHTEARARHAWQLXQGATVLGLFRVTPEIPAGLPSPRSE

SEQ ID NO: 522 - protein, 174 aa, Artificial sequence
  synthetic sequence
  misc_feature (150)..(150): Xaa can be any amino acid other than glutamine
PAGLLDLRQGMFAQLVAQNVLLIDGPLSWYSDPGLAGVSLTGGLSYKEDTKELVVAKAGVYYVFFQLELRRVVAGEGSGSVSLALHLQPLRSAAGAAALALTVDLPPASSEARNSAFGFQGRLLHLSAGQRLGVHLHTEARARHAWQLTXGATVLGLFRVTPEIPAGLPSPRSE

SEQ ID NO: 523 - protein, 174 aa, Artificial sequence
  synthetic sequence
  misc_feature (151)..(151): Xaa can be any amino acid other than glycine
PAGLLDLRQGMFAQLVAQNVLLIDGPLSWYSDPGLAGVSLTGGLSYKEDTKELVVAKAGVYYVFFQLELRRVVAGEGSGSVSLALHLQPLRSAAGAAALALTVDLPPASSEARNSAFGFQGRLLHLSAGQRLGVHLHTEARARHAWQLTQXATVLGLFRVTPEIPAGLPSPRSE

SEQ ID NO: 524 - protein, 174 aa, Artificial sequence
  synthetic sequence
  misc_feature (153)..(153): Xaa can be any amino acid other than threonine
PAGLLDLRQGMFAQLVAQNVLLIDGPLSWYSDPGLAGVSLTGGLSYKEDTKELVVAKAGVYYVFFQLELRRVVAGEGSGSVSLALHLQPLRSAAGAAALALTVDLPPASSEARNSAFGFQGRLLHLSAGQRLGVHLHTEARARHAWQLTQGAXVLGLFRVTPEIPAGLPSPRSE

SEQ ID NO: 525 - protein, 174 aa, Artificial sequence
  synthetic sequence
  misc_feature (154)..(154): Xaa can be any amino acid other than valine
PAGLLDLRQGMFAQLVAQNVLLIDGPLSWYSDPGLAGVSLTGGLSYKEDTKELVVAKAGVYYVFFQLELRRVVAGEGSGSVSLALHLQPLRSAAGAAALALTVDLPPASSEARNSAFGFQGRLLHLSAGQRLGVHLHTEARARHAWQLTQGATXLGLFRVTPEIPAGLPSPRSE

SEQ ID NO: 526 - protein, 10 aa, Artificial sequence
  synthetic sequence
KLLGPHVEGL

SEQ ID NO: 527 - protein, 133 aa, Artificial sequence
  synthetic sequence
  misc_feature (42)..(42): Xaa can be any amino acid other than phenylalanine
APTSSSTKKTQLQLEHLLLDLQMILNGINNYKNPKLTRMLTXKFYMPKKATELKHLQCLEEELKPLEEVLNLAQSKNFHLRPRDLISNINVIVLELKGSETTFMCEYADETATIVEFLNRWITFCQSIISTLT

SEQ ID NO: 528 - protein, 133 aa, Artificial sequence
  synthetic sequence
  misc_feature (20)..(20): Xaa can be any amino acid other than aspartic acid
APTSSSTKKTQLQLEHLLLXLQMILNGINNYKNPKLTRMLTFKFYMPKKATELKHLQCLEEELKPLEEVLNLAQSKNFHLRPRDLISNINVIVLELKGSETTFMCEYADETATIVEFLNRWITFCQSIISTLT

SEQ ID NO: 529 - protein, 133 aa, Artificial sequence
  synthetic sequence
  misc_feature (15)..(15): Xaa can be any amino acid other than glutamic acid
APTSSSTKKTQLQLXHLLLDLQMILNGINNYKNPKLTRMLTFKFYMPKKATELKHLQCLEEELKPLEEVLNLAQSKNFHLRPRDLISNINVIVLELKGSETTFMCEYADETATIVEFLNRWITFCQSIISTLT

SEQ ID NO: 530 - protein, 133 aa, Artificial sequence
  synthetic sequence
  misc_feature (16)..(16): Xaa can be any amino acid other than histidine
APTSSSTKKTQLQLEXLLLDLQMILNGINNYKNPKLTRMLTFKFYMPKKATELKHLQCLEEELKPLEEVLNLAQSKNFHLRPRDLISNINVIVLELKGSETTFMCEYADETATIVEFLNRWITFCQSIISTLT

SEQ ID NO: 531 - protein, 133 aa, Artificial sequence; identical to SEQ ID NO: 530
  synthetic sequence
  misc_feature (16)..(16): Xaa can be any amino acid other than histidine

SEQ ID NO: 532 - protein, 133 aa, Artificial sequence
  synthetic sequence
  misc_feature (45)..(45): Xaa can be any amino acid other than tyrosine
APTSSSTKKTQLQLEHLLLDLQMILNGINNYKNPKLTRMLTFKFXMPKKATELKHLQCLEEELKPLEEVLNLAQSKNFHLRPRDLISNINVIVLELKGSETTFMCEYADETATIVEFLNRWITFCQSIISTLT

SEQ ID NO: 533 - protein, 133 aa, Artificial sequence
  synthetic sequence
  misc_feature (126)..(126): Xaa can be any amino acid other than glutamine
APTSSSTKKTQLQLEHLLLDLQMILNGINNYKNPKLTRMLTFKFYMPKKATELKHLQCLEEELKPLEEVLNLAQSKNFHLRPRDLISNINVIVLELKGSETTFMCEYADETATIVEFLNRWITFCXSIISTLT

SEQ ID NO: 534 - protein, 133 aa, Artificial sequence
  synthetic sequence
  misc_feature (16)..(16): Xaa can be any amino acid other than histidine
  misc_feature (42)..(42): Xaa can be any amino acid other than phenylalanine
APTSSSTKKTQLQLEXLLLDLQMILNGINNYKNPKLTRMLTXKFYMPKKATELKHLQCLEEELKPLEEVLNLAQSKNFHLRPRDLISNINVIVLELKGSETTFMCEYADETATIVEFLNRWITFCQSIISTLT

SEQ ID NO: 535 - protein, 133 aa, Artificial sequence
  synthetic sequence
  misc_feature (20)..(20): Xaa can be any amino acid other than aspartic acid
  misc_feature (42)..(42): Xaa can be any amino acid other than phenylalanine
APTSSSTKKTQLQLEHLLLXLQMILNGINNYKNPKLTRMLTXKFYMPKKATELKHLQCLEEELKPLEEVLNLAQSKNFHLRPRDLISNINVIVLELKGSETTFMCEYADETATIVEFLNRWITFCQSIISTLT

SEQ ID NO: 536 - protein, 133 aa, Artificial sequence
  synthetic sequence
  misc_feature (15)..(15): Xaa can be any amino acid other than glutamic acid
  misc_feature (20)..(20): Xaa can be any amino acid other than aspartic acid
  misc_feature (42)..(42): Xaa can be any amino acid other than phenylalanine
APTSSSTKKTQLQLXHLLLXLQMILNGINNYKNPKLTRMLTXKFYMPKKATELKHLQCLEEELKPLEEVLNLAQSKNFHLRPRDLISNINVIVLELKGSETTFMCEYADETATIVEFLNRWITFCQSIISTLT

SEQ ID NO: 537 - protein, 133 aa, Artificial sequence
  synthetic sequence
  misc_feature (16)..(16): Xaa can be any amino acid other than histidine
  misc_feature (20)..(20): Xaa can be any amino acid other than aspartic acid
  misc_feature (42)..(42): Xaa can be any amino acid other than phenylalanine
APTSSSTKKTQLQLEXLLLXLQMILNGINNYKNPKLTRMLTXKFYMPKKATELKHLQCLEEELKPLEEVLNLAQSKNFHLRPRDLISNINVIVLELKGSETTFMCEYADETATIVEFLNRWITFCQSIISTLT

SEQ ID NO: 538 - protein, 133 aa, Artificial sequence
  synthetic sequence
  misc_feature (20)..(20): Xaa can be any amino acid other than aspartic acid
  misc_feature (42)..(42): Xaa can be any amino acid other than phenylalanine
  misc_feature (126)..(126): Xaa can be any amino acid other than glutamine
APTSSSTKKTQLQLEHLLLXLQMILNGINNYKNPKLTRMLTXKFYMPKKATELKHLQCLEEELKPLEEVLNLAQSKNFHLRPRDLISNINVIVLELKGSETTFMCEYADETATIVEFLNRWITFCXSIISTLT

SEQ ID NO: 539 - protein, 133 aa, Artificial sequence
  synthetic sequence
  misc_feature (20)..(20): Xaa can be any amino acid other than aspartic acid
  misc_feature (42)..(42): Xaa can be any amino acid other than phenylalanine
  misc_feature (45)..(45): Xaa can be any amino acid other than tyrosine
APTSSSTKKTQLQLEHLLLXLQMILNGINNYKNPKLTRMLTXKFXMPKKATELKHLQCLEEELKPLEEVLNLAQSKNFHLRPRDLISNINVIVLELKGSETTFMCEYADETATIVEFLNRWITFCQSIISTLT

SEQ ID NO: 540 - protein, 133 aa, Artificial sequence
  synthetic sequence
  misc_feature (16)..(16): Xaa can be any amino acid other than histidine
  misc_feature (20)..(20): Xaa can be any amino acid other than aspartic acid
  misc_feature (42)..(42): Xaa can be any amino acid other than phenylalanine
  misc_feature (45)..(45): Xaa can be any amino acid other than tyrosine
APTSSSTKKTQLQLEXLLLXLQMILNGINNYKNPKLTRMLTXKFXMPKKATELKHLQCLEEELKPLEEVLNLAQSKNFHLRPRDLISNINVIVLELKGSETTFMCEYADETATIVEFLNRWITFCQSIISTLT

SEQ ID NO: 541 - protein, 133 aa, Artificial sequence
  synthetic sequence
  misc_feature (20)..(20): Xaa can be any amino acid other than aspartic acid
  misc_feature (42)..(42): Xaa can be any amino acid other than phenylalanine
  misc_feature (45)..(45): Xaa can be any amino acid other than tyrosine
  misc_feature (126)..(126): Xaa can be any amino acid other than glutamine
APTSSSTKKTQLQLEHLLLXLQMILNGINNYKNPKLTRMLTXKFXMPKKATELKHLQCLEEELKPLEEVLNLAQSKNFHLRPRDLISNINVIVLELKGSETTFMCEYADETATIVEFLNRWITFCXSIISTLT

SEQ ID NO: 542 - protein, 133 aa, Artificial sequence
  synthetic sequence
  misc_feature (16)..(16): Xaa can be any amino acid other than histidine
  misc_feature (20)..(20): Xaa can be any amino acid other than aspartic acid
  misc_feature (42)..(42): Xaa can be any amino acid other than phenylalanine
  misc_feature (45)..(45): Xaa can be any amino acid other than tyrosine
  misc_feature (126)..(126): Xaa can be any amino acid other than glutamine
APTSSSTKKTQLQLEXLLLXLQMILNGINNYKNPKLTRMLTXKFXMPKKATELKHLQCLEEELKPLEEVLNLAQSKNFHLRPRDLISNINVIVLELKGSETTFMCEYADETATIVEFLNRWITFCXSIISTLT

SEQ ID NO: 543 - protein, 133 aa, Artificial sequence
  synthetic sequence
  misc_feature (16)..(16): Xaa can be any amino acid other than histidine
  misc_feature (42)..(42): Xaa can be any amino acid other than phenylalanine
  misc_feature (126)..(126): Xaa can be any amino acid other than glutamine
APTSSSTKKTQLQLEXLLLDLQMILNGINNYKNPKLTRMLTXKFYMPKKATELKHLQCLEEELKPLEEVLNLAQSKNFHLRPRDLISNINVIVLELKGSETTFMCEYADETATIVEFLNRWITFCXSIISTLT

SEQ ID NO: 544 - protein, 9 aa, Artificial sequence
  synthetic sequence
YPYDVPDYA

SEQ ID NO: 545 - protein, 8 aa, Artificial sequence
  synthetic sequence
DYKDDDDK

SEQ ID NO: 546 - protein, 10 aa, Artificial sequence
  synthetic sequence
EQKLISEEDL

SEQ ID NO: 547 - protein, 5 aa, Artificial sequence
  synthetic sequence
HHHHH

SEQ ID NO: 548 - protein, 6 aa, Artificial sequence
  synthetic sequence
HHHHHH

SEQ ID NO: 549 - protein, 10 aa, Artificial sequence
  synthetic sequence
EQKLISEEDL

SEQ ID NO: 550 - protein, 8 aa, Artificial sequence
  synthetic sequence
DYKDDDDK

SEQ ID NO: 551 - protein, 8 aa, Artificial sequence
  synthetic sequence
WSHPQFEK

SEQ ID NO: 552 - protein, 9 aa, Artificial sequence
  synthetic sequence
YPYDVPDYA

SEQ ID NO: 553 - protein, 5 aa, Artificial sequence
  synthetic sequence
RYIRS

SEQ ID NO: 554 - protein, 4 aa, Artificial sequence
  synthetic sequence
FHHT

SEQ ID NO: 555 - protein, 17 aa, Artificial sequence
  synthetic sequence
WEAAAREACCRECCARA

SEQ ID NO: 556 - protein, 8 aa, Artificial sequence
  synthetic sequence
LEVLFQGP

SEQ ID NO: 557 - protein, 7 aa, Artificial sequence
  synthetic sequence
ENLYTQS

SEQ ID NO: 558 - protein, 5 aa, Artificial sequence
  synthetic sequence
DDDDK

SEQ ID NO: 559 - protein, 4 aa, Artificial sequence
  synthetic sequence
LVPR

SEQ ID NO: 560 - protein, 22 aa, Artificial sequence
  synthetic sequence
GSGATNFSLLKQAGDVEENPGP

SEQ ID NO: 561 - protein, 1069 aa, Artificial sequence
  synthetic sequence
APTSSSTKKTQLQLEALLLDLQMILNGINNYKNPKLTRMLTAKFYMPKKATELKHLQCLEEELKPLEEVLNLAQSKNFHLRPRDLISNINVIVLELKGSETTFMCEYADETATIVEFLNRWITFCQSIISTLTGGGGSGGGGSGGGGSGGGGSAPTSSSTKKTQLQLEALLLDLQMILNGINNYKNPKLTRMLTAKFYMPKKATELKHLQCLEEELKPLEEVLNLAQSKNFHLRPRDLISNINVIVLELKGSETTFMCEYADETATIVEFLNRWITFCQSIISTLTGGGGSGGGGSGGGGSGGGGSGSHSMRYFFTSVSRPGRGEPRFIAVGYVDDTQFVRFDSDAASQRMEPRAPWIEQEGPEYWDGETRKVKAHSQTHRVDLGTLRGCYNQSEAGSHTVQRMYGCDVGSDWRFLRGYHQYAYDGKDYIALKEDLRSWTAADMAAQTTKHKWEAAHVAEQLRAYLEGTCVEWLRRYLENGKETLQRTDAPKTHMTHHAVSDHEATLRCWALSFYPAEITLTWQRDGEDQTQDTELVETRPCGDGTFQKWAAVVVPSGQEQRYTCHVQHEGLPKPLTLRWEAAAGGDKTHTCPPCPAPEAAGGPSVFLFPPKPKDTLMISRTPEVTCVVVDVSHEDPEVKFNWYVDGVEVHNAKTKPREEQYNSTYRVVSVLTVLHQDWLNGKEYKCKVSNKALPAPIEKTISKAKGQPREPQVYTLPPSREEMTKNQVSLTCLVKGFYPSDIAVEWESNGQPENNYKTTPPVLDSDGSFFLYSKLTVDKSRWQQGNVFSCSVMHEALHNHYTQKSLSLSPGGGGGSGGGGSGGGGSEVQLVESGGGLVQPGGSLRLSCAASGFNIKDTYIHWVRQAPGKGLEWVARIYPTNGYTRYADSVKGRFTISADTSKNTAYLQMNSLRAEDTAVYYCSRWGGDGFYAMDYWGQGTLVTVSSGGGGSGGGGSGGGGSDIQMTQSPSSLSASVGDRVTITCRASQDVNTAVAWYQQKPGKAPKLLIYSASFLYSGVPSRFSGSRSGTDFTLTISSLQPEDFATYYCQQHYTTPPTFGQGTKVEIK

SEQ ID NO: 562 - protein, 1077 aa, Artificial sequence
  synthetic sequence
APTSSSTKKTQLQLEALLLDLQMILNGINNYKNPKLTRMLTAKFYMPKKATELKHLQCLEEELKPLEEVLNLAQSKNFHLRPRDLISNINVIVLELKGSETTFMCEYADETATIVEFLNRWITFCQSIISTLTGGGGSGGGGSGGGGSGGGGSAPTSSSTKKTQLQLEALLLDLQMILNGINNYKNPKLTRMLTAKFYMPKKATELKHLQCLEEELKPLEEVLNLAQSKNFHLRPRDLISNINVIVLELKGSETTFMCEYADETATIVEFLNRWITFCQSIISTLTGGGGSGGGGSGGGGSGGGGSGSHSMRYFFTSVSRPGRGEPRFIAVGYVDDTQFVRFDSDAASQRMEPRAPWIEQEGPEYWDGETRKVKAHSQTHRVDLGTLRGCYNQSEAGSHTVQRMYGCDVGSDWRFLRGYHQYAYDGKDYIALKEDLRSWTAADMAAQTTKHKWEAAHVAEQLRAYLEGTCVEWLRRYLENGKETLQRTDAPKTHMTHHAVSDHEATLRCWALSFYPAEITLTWQRDGEDQTQDTELVETRPCGDGTFQKWAAVVVPSGQEQRYTCHVQHEGLPKPLTLRWEAAAGGDKTHTCPPCPAPEAAGGPSVFLFPPKPKDTLMISRTPEVTCVVVDVSHEDPEVKFNWYVDGVEVHNAKTKPREEQYNSTYRVVSVLTVLHQDWLNGKEYKCKVSNKALPAPIEKTISKAKGQPREPQVYTLPPSREEMTKNQVSLTCLVKGFYPSDIAVEWESNGQPENNYKTTPPVLDSDGSFFLYSKLTVDKSRWQQGNVFSCSVMHEALHNHYTQKSLSLSPGGGGGSGGGGSGGGGSDIQLTQSPASLAVSLGQRATISCKASQSVDYDGDSYLNWYQQIPGQPPKLLIYDASNLVSGIPPRFSGSGSGTDFTLNIHPVEKVDAATYHCQQSTEDPWTFGGGTKLEIKGGGGSGGGGSGGGGSQVQLQQSGAELVRPGSSVKISCKASGYAFSSYWMNWVKQRPGQGLEWIGQIWPGDGDTNYNGKFKGKATLTADESSSTAYMQLSSLASEDSAVYFCARRETTTVGRYYYAMDYWGQGTTVTVSS

SEQ ID NO: 563 - protein, 8 aa, Artificial sequence
  synthetic sequence
GYTFTDYS

SEQ ID NO: 564 - protein, 8 aa, Artificial sequence
  synthetic sequence
INTETGVP

SEQ ID NO: 565 - protein, 8 aa, Artificial sequence
  synthetic sequence
ARRTGFDY

SEQ ID NO: 566 - protein, 11 aa, Artificial sequence
  synthetic sequence
KNLLHSDGITY

SEQ ID NO: 567 - protein, 9 aa, Artificial sequence
  synthetic sequence
VQVLELPFT

SEQ ID NO: 568 - protein, 8 aa, Artificial sequence
  synthetic sequence
GFTFSSYA

SEQ ID NO: 569 - protein, 8 aa, Artificial sequence
  synthetic sequence
ISDGGSYS

SEQ ID NO: 570 - protein, 14 aa, Artificial sequence
  synthetic sequence
ARDSYYDNSYVRDY

SEQ ID NO: 571 - protein, 6 aa, Artificial sequence
  synthetic sequence
QDINTF

SEQ ID NO: 572 - protein, 9 aa, Artificial sequence
  synthetic sequence
LQYDEFPLT
